United States Patent Application Publication US 2025/0154528 A1 - sequence listing, part 5

SEQ ID NO: 194947 - protein, 7 aa, synthetic construct
RPNREYP

SEQ ID NO: 194948 - protein, 7 aa, synthetic construct
RPVRDIT

SEQ ID NO: 194949 - protein, 7 aa, synthetic construct
RPERSTQ

SEQ ID NO: 194950 - protein, 7 aa, synthetic construct
EKNRTTS

SEQ ID NO: 194951 - protein, 7 aa, synthetic construct
RPSRVDS

SEQ ID NO: 194952 - protein, 7 aa, synthetic construct
PTNRDKS

SEQ ID NO: 194953 - protein, 7 aa, synthetic construct
YPLRDKS

SEQ ID NO: 194954 - protein, 7 aa, synthetic construct
KPNRAES

SEQ ID NO: 194955 - protein, 7 aa, synthetic construct
RMNRTES

SEQ ID NO: 194956 - protein, 7 aa, synthetic construct
RVNRDAV

SEQ ID NO: 194957 - protein, 7 aa, synthetic construct
LPKRDTF

SEQ ID NO: 194958 - protein, 7 aa, synthetic construct
YPQRDKS

SEQ ID NO: 194959 - protein, 7 aa, synthetic construct
RPLRDVN

SEQ ID NO: 194960 - protein, 7 aa, synthetic construct
KSNRDTL

SEQ ID NO: 194961 - protein, 7 aa, synthetic construct
RQNKDTS

SEQ ID NO: 194962 - protein, 7 aa, synthetic construct
RIPRDLS

SEQ ID NO: 194963 - protein, 7 aa, synthetic construct
RPKHDLS

SEQ ID NO: 194964 - protein, 7 aa, synthetic construct
KPNRDTS

SEQ ID NO: 194965 - protein, 7 aa, synthetic construct
AKNRDSS

SEQ ID NO: 194966 - protein, 7 aa, synthetic construct
RTVRDNS

SEQ ID NO: 194967 - protein, 7 aa, synthetic construct
RPMRGES

SEQ ID NO: 194968 - protein, 7 aa, synthetic construct
KVNRDVS

SEQ ID NO: 194969 - protein, 7 aa, synthetic construct
RQGRDTG

SEQ ID NO: 194970 - protein, 7 aa, synthetic construct
RTERQTS

SEQ ID NO: 194971 - protein, 7 aa, synthetic construct
VKNRDTM

SEQ ID NO: 194972 - protein, 7 aa, synthetic construct
RRNQDTG

SEQ ID NO: 194973 - protein, 7 aa, synthetic construct
PKNRDLS

SEQ ID NO: 194974 - protein, 7 aa, synthetic construct
AVKRDTS

SEQ ID NO: 194975 - protein, 7 aa, synthetic construct
RPSRDAL

SEQ ID NO: 194976 - protein, 7 aa, synthetic construct
RTTRDVS

SEQ ID NO: 194977 - protein, 7 aa, synthetic construct
QKNRDTT

SEQ ID NO: 194978 - protein, 7 aa, synthetic construct
RPMRDVL

SEQ ID NO: 194979 - protein, 7 aa, synthetic construct
RPGRDNS

SEQ ID NO: 194980 - protein, 7 aa, synthetic construct
RMPRDTL

SEQ ID NO: 194981 - protein, 7 aa, synthetic construct
RIERATS

SEQ ID NO: 194982 - protein, 7 aa, synthetic construct
MKNRDTQ

SEQ ID NO: 194983 - protein, 7 aa, synthetic construct
RGLRDTG

SEQ ID NO: 194984 - protein, 7 aa, synthetic construct
RHDRLTS

SEQ ID NO: 194985 - protein, 7 aa, synthetic construct
RVPRDPS

SEQ ID NO: 194986 - protein, 7 aa, synthetic construct
NKNRDPS

SEQ ID NO: 194987 - protein, 7 aa, synthetic construct
RINADTR

SEQ ID NO: 194988 - protein, 7 aa, synthetic construct
RPLREPS

SEQ ID NO: 194989 - protein, 7 aa, synthetic construct
KMTRDTS

SEQ ID NO: 194990 - protein, 7 aa, synthetic construct
RPNPRTD

SEQ ID NO: 194991 - protein, 7 aa, synthetic construct
RPTRDIT

SEQ ID NO: 194992 - protein, 7 aa, synthetic construct
KPNRDNN

SEQ ID NO: 194993 - protein, 7 aa, synthetic construct
RVERLTS

SEQ ID NO: 194994 - protein, 7 aa, synthetic construct
RPQRVDS

SEQ ID NO: 194995 - protein, 7 aa, synthetic construct
RTMRDVS

SEQ ID NO: 194996 - protein, 7 aa, synthetic construct
KPNRDVH

SEQ ID NO: 194997 - protein, 7 aa, synthetic construct
RGDRDTR

SEQ ID NO: 194998 - protein, 7 aa, synthetic construct
KPIRDTH

SEQ ID NO: 194999 - protein, 7 aa, synthetic construct
RTPRDTQ

SEQ ID NO: 195000 - protein, 7 aa, synthetic construct
RPTREGS

SEQ ID NO: 195001 - protein, 7 aa, synthetic construct
QPHRITS

SEQ ID NO: 195002 - protein, 7 aa, synthetic construct
RPNRELQ

SEQ ID NO: 195003 - protein, 7 aa, synthetic construct
RPIRVDS

SEQ ID NO: 195004 - protein, 7 aa, synthetic construct
KPQRDNS

SEQ ID NO: 195005 - protein, 7 aa, synthetic construct
RPTRDPP

SEQ ID NO: 195006 - protein, 7 aa, synthetic construct
KRNPDTS

SEQ ID NO: 195007 - protein, 7 aa, synthetic construct
MPKRDHS

SEQ ID NO: 195008 - protein, 7 aa, synthetic construct
RPNREFV

SEQ ID NO: 195009 - protein, 7 aa, synthetic construct
SRPRDTS

SEQ ID NO: 195010 - protein, 7 aa, synthetic construct
RGARDVS

SEQ ID NO: 195011 - protein, 7 aa, synthetic construct
RKERDNS

SEQ ID NO: 195012 - protein, 7 aa, synthetic construct
KNNRDTN

SEQ ID NO: 195013 - protein, 7 aa, synthetic construct
RPMREIS

SEQ ID NO: 195014 - protein, 7 aa, synthetic construct
RPSRDMI

SEQ ID NO: 195015 - protein, 7 aa, synthetic construct
RRNELTS

SEQ ID NO: 195016 - protein, 7 aa, synthetic construct
NPRRDTV

SEQ ID NO: 195017 - protein, 7 aa, synthetic construct
RPPRDER

SEQ ID NO: 195018 - protein, 7 aa, synthetic construct
RLNRVTE

SEQ ID NO: 195019 - protein, 7 aa, synthetic construct
RPNRMEN

SEQ ID NO: 195020 - protein, 7 aa, synthetic construct
RANRDLS

SEQ ID NO: 195021 - protein, 7 aa, synthetic construct
RPERVYS

SEQ ID NO: 195022 - protein, 7 aa, synthetic construct
RPVRDQF

SEQ ID NO: 195023 - protein, 7 aa, synthetic construct
RPVRETV

SEQ ID NO: 195024 - protein, 7 aa, synthetic construct
RPNREDR

SEQ ID NO: 195025 - protein, 7 aa, synthetic construct
RVQRDTL

SEQ ID NO: 195026 - protein, 7 aa, synthetic construct
KPGRDLS

SEQ ID NO: 195027 - protein, 7 aa, synthetic construct
RANADTR

SEQ ID NO: 195028 - protein, 7 aa, synthetic construct
LVKRDTS

SEQ ID NO: 195029 - protein, 7 aa, synthetic construct
RMNRDAV

SEQ ID NO: 195030 - protein, 7 aa, synthetic construct
RPNRMEV

SEQ ID NO: 195031 - protein, 7 aa, synthetic construct
RPDRHMS

SEQ ID NO: 195032 - protein, 7 aa, synthetic construct
RPNPYTT

SEQ ID NO: 195033 - protein, 7 aa, synthetic construct
RPTRETT

SEQ ID NO: 195034 - protein, 7 aa, synthetic construct
KAQRDTS

SEQ ID NO: 195035 - protein, 7 aa, synthetic construct
RQNKDSS

SEQ ID NO: 195036 - protein, 7 aa, synthetic construct
LSNRDTR

SEQ ID NO: 195037 - protein, 7 aa, synthetic construct
RMAKDTS

SEQ ID NO: 195038 - protein, 7 aa, synthetic construct
QKNRDNS

SEQ ID NO: 195039 - protein, 7 aa, synthetic construct
RKERDLS

SEQ ID NO: 195040 - protein, 7 aa, synthetic construct
RASRDTI

SEQ ID NO: 195041 - protein, 7 aa, synthetic construct
RQRQDTS

SEQ ID NO: 195042 - protein, 7 aa, synthetic construct
RSVRDTM

SEQ ID NO: 195043 - protein, 7 aa, synthetic construct
PKMRDTS

SEQ ID NO: 195044 - protein, 7 aa, synthetic construct
RLNRLES

SEQ ID NO: 195045 - protein, 7 aa, synthetic construct
RTGRDTA

SEQ ID NO: 195046 - protein, 7 aa, synthetic construct
RPGRDQA

SEQ ID NO: 195047 - protein, 7 aa, synthetic construct
RPNPYTA

SEQ ID NO: 195048 - protein, 7 aa, synthetic construct
VPKRDTS

SEQ ID NO: 195049 - protein, 7 aa, synthetic construct
RPSRLDS

SEQ ID NO: 195050 - protein, 7 aa, synthetic construct
KPNRSTD

SEQ ID NO: 195051 - protein, 7 aa, synthetic construct
KANRDFS

SEQ ID NO: 195052 - protein, 7 aa, synthetic construct
VPARHTS

SEQ ID NO: 195053 - protein, 7 aa, synthetic construct
RPSHATS

SEQ ID NO: 195054 - protein, 7 aa, synthetic construct
RPVRDQQ

SEQ ID NO: 195055 - protein, 7 aa, synthetic construct
RPQRDGQ

SEQ ID NO: 195056 - protein, 7 aa, synthetic construct
RLTRDTG

SEQ ID NO: 195057 - protein, 7 aa, synthetic construct
RPMRDTS

SEQ ID NO: 195058 - protein, 7 aa, synthetic construct
RHNPATS

SEQ ID NO: 195059 - protein, 7 aa, synthetic construct
RPGRDPI

SEQ ID NO: 195060 - protein, 7 aa, synthetic construct
RENRVLS

SEQ ID NO: 195061 - protein, 7 aa, synthetic construct
VPGRHTS

SEQ ID NO: 195062 - protein, 7 aa, synthetic construct
RPSRGES

SEQ ID NO: 195063 - protein, 7 aa, synthetic construct
RVNREIS

SEQ ID NO: 195064 - protein, 7 aa, synthetic construct
GKNRDTM

SEQ ID NO: 195065 - protein, 7 aa, synthetic construct
RPARDMF

SEQ ID NO: 195066 - protein, 7 aa, synthetic construct
RVDRHTS

SEQ ID NO: 195067 - protein, 7 aa, synthetic construct
KQNRDMS

SEQ ID NO: 195068 - protein, 7 aa, synthetic construct
RPVRTTD

SEQ ID NO: 195069 - protein, 7 aa, synthetic construct
RVNKDPS

SEQ ID NO: 195070 - protein, 7 aa, synthetic construct
RPHQDTK

SEQ ID NO: 195071 - protein, 7 aa, synthetic construct
RPDRSGS

SEQ ID NO: 195072 - protein, 7 aa, synthetic construct
RMNVDTK

SEQ ID NO: 195073 - protein, 7 aa, synthetic construct
RPARDNQ

SEQ ID NO: 195074 - protein, 7 aa, synthetic construct
IPNRERS

SEQ ID NO: 195075 - protein, 7 aa, synthetic construct
RLNPHTS

SEQ ID NO: 195076 - protein, 7 aa, synthetic construct
REARQTS

SEQ ID NO: 195077 - protein, 7 aa, synthetic construct
RPKQDTY

SEQ ID NO: 195078 - protein, 7 aa, synthetic construct
RGNKDIS

SEQ ID NO: 195079 - protein, 7 aa, synthetic construct
GKNRDMS

SEQ ID NO: 195080 - protein, 7 aa, synthetic construct
REKRDTG

SEQ ID NO: 195081 - protein, 7 aa, synthetic construct
RNPRDTA

SEQ ID NO: 195082 - protein, 7 aa, synthetic construct
VPRRDTG

SEQ ID NO: 195083 - protein, 7 aa, synthetic construct
RPQRDDR

SEQ ID NO: 195084 - protein, 7 aa, synthetic construct
RPIRDNL

SEQ ID NO: 195085 - protein, 7 aa, synthetic construct
RPVRDVH

SEQ ID NO: 195086 - protein, 7 aa, synthetic construct
RLPRDTM

SEQ ID NO: 195087 - protein, 7 aa, synthetic construct
RVNRTTE

SEQ ID NO: 195088 - protein, 7 aa, synthetic construct
RMQRDTV

SEQ ID NO: 195089 - protein, 7 aa, synthetic construct
RPNRTES

SEQ ID NO: 195090 - protein, 7 aa, synthetic construct
RANRDGV

SEQ ID NO: 195091 - protein, 7 aa, synthetic construct
RQPRDTS

SEQ ID NO: 195092 - protein, 7 aa, synthetic construct
LRPRDTS

SEQ ID NO: 195093 - protein, 7 aa, synthetic construct
RPGRDLT

SEQ ID NO: 195094 - protein, 7 aa, synthetic construct
RVNRDVA

SEQ ID NO: 195095 - protein, 7 aa, synthetic construct
RPARLDS

SEQ ID NO: 195096 - protein, 7 aa, synthetic construct
RPHGTTS

SEQ ID NO: 195097 - protein, 7 aa, synthetic construct
RPNREPL

SEQ ID NO: 195098 - protein, 7 aa, synthetic construct
RQSRDTL

SEQ ID NO: 195099 - protein, 7 aa, synthetic construct
RNVRDSS

SEQ ID NO: 195100 - protein, 7 aa, synthetic construct
PPKRDTY

SEQ ID NO: 195101 - protein, 7 aa, synthetic construct
KPNRSES

SEQ ID NO: 195102 - protein, 7 aa, synthetic construct
FKNRDTT

SEQ ID NO: 195103 - protein, 7 aa, synthetic construct
RANRDNA

SEQ ID NO: 195104 - protein, 7 aa, synthetic construct
RETRLTS

SEQ ID NO: 195105 - protein, 7 aa, synthetic construct
RMRPDTS

SEQ ID NO: 195106 - protein, 7 aa, synthetic construct
KINRDMS

SEQ ID NO: 195107 - protein, 7 aa, synthetic construct
RQNREVS

SEQ ID NO: 195108 - protein, 7 aa, synthetic construct
RPDRPAS

SEQ ID NO: 195109 - protein, 7 aa, synthetic construct
RPDRQTS

SEQ ID NO: 195110 - protein, 7 aa, synthetic construct
RTGRDTP

SEQ ID NO: 195111 - protein, 7 aa, synthetic construct
IQNRDKS

SEQ ID NO: 195112 - protein, 7 aa, synthetic construct
RSNKDPS

SEQ ID NO: 195113 - protein, 7 aa, synthetic construct
RGNRDLG

SEQ ID NO: 195114 - protein, 7 aa, synthetic construct
RMNRITE

SEQ ID NO: 195115 - protein, 7 aa, synthetic construct
RPSRDPV

SEQ ID NO: 195116 - protein, 7 aa, synthetic construct
YPKRDSS

SEQ ID NO: 195117 - protein, 7 aa, synthetic construct
RDRKDTS

SEQ ID NO: 195118 - protein, 7 aa, synthetic construct
RPARGTE

SEQ ID NO: 195119 - protein, 7 aa, synthetic construct
QPKRDIS

SEQ ID NO: 195120 - protein, 7 aa, synthetic construct
KMNRDTV

SEQ ID NO: 195121 - protein, 7 aa, synthetic construct
EKNRQTS

SEQ ID NO: 195122 - protein, 7 aa, synthetic construct
KAMRDTS

SEQ ID NO: 195123 - protein, 7 aa, synthetic construct
KMNRDNS

SEQ ID NO: 195124 - protein, 7 aa, synthetic construct
RTGRDGS

SEQ ID NO: 195125 - protein, 7 aa, synthetic construct
KPNRDIA

SEQ ID NO: 195126 - protein, 7 aa, synthetic construct
YQKRDTS

SEQ ID NO: 195127 - protein, 7 aa, synthetic construct
FKNRDPS

SEQ ID NO: 195128 - protein, 7 aa, synthetic construct
STKRDTS

SEQ ID NO: 195129 - protein, 7 aa, synthetic construct
RPNRIDA

SEQ ID NO: 195130 - protein, 7 aa, synthetic construct
RQTRDMS

SEQ ID NO: 195131 - protein, 7 aa, synthetic construct
RMPRDAS

SEQ ID NO: 195132 - protein, 7 aa, synthetic construct
RRNDPTS

SEQ ID NO: 195133 - protein, 7 aa, synthetic construct
NPKRDTV

SEQ ID NO: 195134 - protein, 7 aa, synthetic construct
RLARDVS

SEQ ID NO: 195135 - protein, 7 aa, synthetic construct
RITRETS

SEQ ID NO: 195136 - protein, 7 aa, synthetic construct
RPGRDLV

SEQ ID NO: 195137 - protein, 7 aa, synthetic construct
RPTRDNN

SEQ ID NO: 195138 - protein, 7 aa, synthetic construct
KPNRDPS

SEQ ID NO: 195139 - protein, 7 aa, synthetic construct
RRNDITS

SEQ ID NO: 195140 - protein, 7 aa, synthetic construct
RLNREMS

SEQ ID NO: 195141 - protein, 7 aa, synthetic construct
RPGRAES

SEQ ID NO: 195142 - protein, 7 aa, synthetic construct
YPNRIHS

SEQ ID NO: 195143 - protein, 7 aa, synthetic construct
RTPRDLS

SEQ ID NO: 195144 - protein, 7 aa, synthetic construct
RPRMDTT

SEQ ID NO: 195145 - protein, 7 aa, synthetic construct
VKNRDTG

SEQ ID NO: 195146 - protein, 7 aa, synthetic construct
KPLRDTL

SEQ ID NO: 195147 - protein, 7 aa, synthetic construct
RDGRGTS

SEQ ID NO: 195148 - protein, 7 aa, synthetic construct
RPARDSA

SEQ ID NO: 195149 - protein, 7 aa, synthetic construct
RINREAS

SEQ ID NO: 195150 - protein, 7 aa, synthetic construct
RPDRMSS

SEQ ID NO: 195151 - protein, 7 aa, synthetic construct
RPNFEKS

SEQ ID NO: 195152 - protein, 7 aa, synthetic construct
RPNRGEV

SEQ ID NO: 195153 - protein, 7 aa, synthetic construct
LKNRDLS

SEQ ID NO: 195154 - protein, 7 aa, synthetic construct
KPSRDTM

SEQ ID NO: 195155 - protein, 7 aa, synthetic construct
RSPRDTS

SEQ ID NO: 195156 - protein, 7 aa, synthetic construct
YPNRDKT

SEQ ID NO: 195157 - protein, 7 aa, synthetic construct
RVVRDNS

SEQ ID NO: 195158 - protein, 7 aa, synthetic construct
RPPRDEK

SEQ ID NO: 195159 - protein, 7 aa, synthetic construct
RAARDTN

SEQ ID NO: 195160 - protein, 7 aa, synthetic construct
PKNRDTV

SEQ ID NO: 195161 - protein, 7 aa, synthetic construct
REVRVTS

SEQ ID NO: 195162 - protein, 7 aa, synthetic construct
KPQRDTA

SEQ ID NO: 195163 - protein, 7 aa, synthetic construct
RLERPTS

SEQ ID NO: 195164 - protein, 7 aa, synthetic construct
RPTRDQA

SEQ ID NO: 195165 - protein, 7 aa, synthetic construct
RDNRHTA

SEQ ID NO: 195166 - protein, 7 aa, synthetic construct
RPDRNIS

SEQ ID NO: 195167 - protein, 7 aa, synthetic construct
RKNADTF

SEQ ID NO: 195168 - protein, 7 aa, synthetic construct
RENRDKA

SEQ ID NO: 195169 - protein, 7 aa, synthetic construct
RQGRDNS

SEQ ID NO: 195170 - protein, 7 aa, synthetic construct
RGQRDTV

SEQ ID NO: 195171 - protein, 7 aa, synthetic construct
VPKRDTM

SEQ ID NO: 195172 - protein, 7 aa, synthetic construct
RVARDLS

SEQ ID NO: 195173 - protein, 7 aa, synthetic construct
RLPRDTV

SEQ ID NO: 195174 - protein, 7 aa, synthetic construct
RMVRDGS

SEQ ID NO: 195175 - protein, 7 aa, synthetic construct
LPKRDYS

SEQ ID NO: 195176 - protein, 7 aa, synthetic construct
RGGRDTP

SEQ ID NO: 195177 - protein, 7 aa, synthetic construct
RIERGTS

SEQ ID NO: 195178 - protein, 7 aa, synthetic construct
KPNRDNF

SEQ ID NO: 195179 - protein, 7 aa, synthetic construct
REARMTS

SEQ ID NO: 195180 - protein, 7 aa, synthetic construct
LSRVDSR

SEQ ID NO: 195181 - protein, 7 aa, synthetic construct
LQRVDSK

SEQ ID NO: 195182 - protein, 7 aa, synthetic construct
DGQVKSR

SEQ ID NO: 195183 - protein, 7 aa, synthetic construct
TSHVSSR

SEQ ID NO: 195184 - protein, 7 aa, synthetic construct
FGNVDKR

SEQ ID NO: 195185 - protein, 7 aa, synthetic construct
QGRTDGR

SEQ ID NO: 195186 - protein, 7 aa, synthetic construct
TGRKDGM

SEQ ID NO: 195187 - protein, 7 aa, synthetic construct
VHKVDSR

SEQ ID NO: 195188 - protein, 7 aa, synthetic construct
MSRNDSR

SEQ ID NO: 195189 - protein, 7 aa, synthetic construct
TTRGESR

SEQ ID NO: 195190 - protein, 7 aa, synthetic construct
TGRVNPI

SEQ ID NO: 195191 - protein, 7 aa, synthetic construct
GDRVGSR

SEQ ID NO: 195192 - protein, 7 aa, synthetic construct
TKRVESS

SEQ ID NO: 195193 - protein, 7 aa, synthetic construct
TNKNDSR

SEQ ID NO: 195194 - protein, 7 aa, synthetic construct
TNRVEVR

SEQ ID NO: 195195 - protein, 7 aa, synthetic construct
LGRVHSN

SEQ ID NO: 195196 - protein, 7 aa, synthetic construct
IDRVGSR

SEQ ID NO: 195197 - protein, 7 aa, synthetic construct
TGREQVR

SEQ ID NO: 195198 - protein, 7 aa, synthetic construct
TGRIAER

SEQ ID NO: 195199 - protein, 7 aa, synthetic construct
TDRKDNR

SEQ ID NO: 195200 - protein, 7 aa, synthetic construct
TGSVDRK

SEQ ID NO: 195201 - protein, 7 aa, synthetic construct
TPRVDRH

SEQ ID NO: 195202 - protein, 7 aa, synthetic construct
TGRGNDR

SEQ ID NO: 195203 - protein, 7 aa, synthetic construct
TERVNPR

SEQ ID NO: 195204 - protein, 7 aa, synthetic construct
IGRQDSK

SEQ ID NO: 195205 - protein, 7 aa, synthetic construct
IGRELSR

SEQ ID NO: 195206 - protein, 7 aa, synthetic construct
VGRTDTR

SEQ ID NO: 195207 - protein, 7 aa, synthetic construct
TGRTLDR

SEQ ID NO: 195208 - protein, 7 aa, synthetic construct
LDRKDSR

SEQ ID NO: 195209 - protein, 7 aa, synthetic construct
ARRVDSP

SEQ ID NO: 195210 - protein, 7 aa, synthetic construct
THRVDRP

SEQ ID NO: 195211 - protein, 7 aa, synthetic construct
TPPVDRR

SEQ ID NO: 195212 - protein, 7 aa, synthetic construct
TGKHDMR

SEQ ID NO: 195213 - protein, 7 aa, synthetic construct
ISRVESR

SEQ ID NO: 195214 - protein, 7 aa, synthetic construct
TGRNTSV

SEQ ID NO: 195215 - protein, 7 aa, synthetic construct
TARVADR

SEQ ID NO: 195216 - protein, 7 aa, synthetic construct
TGKPESR

SEQ ID NO: 195217 - protein, 7 aa, synthetic construct
GKRVDSI

SEQ ID NO: 195218 - protein, 7 aa, synthetic construct
TGRQSSN

SEQ ID NO: 195219 - protein, 7 aa, synthetic construct
TSRTDLR

SEQ ID NO: 195220 - protein, 7 aa, synthetic construct
SGRVEGR

SEQ ID NO: 195221 - protein, 7 aa, synthetic construct
AARVESR

SEQ ID NO: 195222 - protein, 7 aa, synthetic construct
TGRKDQS

SEQ ID NO: 195223 - protein, 7 aa, synthetic construct
LHKVDSR

SEQ ID NO: 195224 - protein, 7 aa, synthetic construct
TDRADKR

SEQ ID NO: 195225 - protein, 7 aa, synthetic construct
TKRVDVS

SEQ ID NO: 195226 - protein, 7 aa, synthetic construct
DGKVISR

SEQ ID NO: 195227 - protein, 7 aa, synthetic construct
RGTVDSK

SEQ ID NO: 195228 - protein, 7 aa, synthetic construct
TGRVRDG

SEQ ID NO: 195229 - protein, 7 aa, synthetic construct
TGRGDLR

SEQ ID NO: 195230 - protein, 7 aa, synthetic construct
TGRVHIA

SEQ ID NO: 195231 - protein, 7 aa, synthetic construct
VGRPDSK

SEQ ID NO: 195232 - protein, 7 aa, synthetic construct
TVRAESR

SEQ ID NO: 195233 - protein, 7 aa, synthetic construct
KERSDSR

SEQ ID NO: 195234 - protein, 7 aa, synthetic construct
VGRVHSP

SEQ ID NO: 195235 - protein, 7 aa, synthetic construct
TGINDKR

SEQ ID NO: 195236 - protein, 7 aa, synthetic construct
TGRMEGR

SEQ ID NO: 195237 - protein, 7 aa, synthetic construct
TGRAESR

SEQ ID NO: 195238 - protein, 7 aa, synthetic construct
TDRAQSR

SEQ ID NO: 195239 - protein, 7 aa, synthetic construct
MGRVENR

SEQ ID NO: 195240 - protein, 7 aa, synthetic construct
TGRPIER

SEQ ID NO: 195241 - protein, 7 aa, synthetic construct
QARVDTR

SEQ ID NO: 195242 - protein, 7 aa, synthetic construct
KDRVESR

SEQ ID NO: 195243 - protein, 7 aa, synthetic construct
QGAKDSR

SEQ ID NO: 195244 - protein, 7 aa, synthetic construct
TGDRMSR

SEQ ID NO: 195245 - protein, 7 aa, synthetic construct
TSRVMDR

SEQ ID NO: 195246 - protein, 7 aa, synthetic construct
TGVADRR

SEQ ID NO: 195247 - protein, 7 aa, synthetic construct
TERKESR

SEQ ID NO: 195248 - protein, 7 aa, synthetic construct
TRAVESR

SEQ ID NO: 195249 - protein, 7 aa, synthetic construct
IGRVESK

SEQ ID NO: 195250 - protein, 7 aa, synthetic construct
IGRMDNR

SEQ ID NO: 195251 - protein, 7 aa, synthetic construct
TGRHLSA

SEQ ID NO: 195252 - protein, 7 aa, synthetic construct
QGRVDVR

SEQ ID NO: 195253 - protein, 7 aa, synthetic construct
KERVDGR

SEQ ID NO: 195254 - protein, 7 aa, synthetic construct
IGRVEMR

SEQ ID NO: 195255 - protein, 7 aa, synthetic construct
VGRADVR

SEQ ID NO: 195256 - protein, 7 aa, synthetic construct
DRKVDSR

SEQ ID NO: 195257 - protein, 7 aa, synthetic construct
MPRNDSR

SEQ ID NO: 195258 - protein, 7 aa, synthetic construct
KGRVDFP

SEQ ID NO: 195259 - protein, 7 aa, synthetic construct
VGREISR

SEQ ID NO: 195260 - protein, 7 aa, synthetic construct
KGRVDNV

SEQ ID NO: 195261 - protein, 7 aa, synthetic construct
TNRADIR

SEQ ID NO: 195262 - protein, 7 aa, synthetic construct
RGNVESR

SEQ ID NO: 195263 - protein, 7 aa, synthetic construct
LTRVESR

SEQ ID NO: 195264 - protein, 7 aa, synthetic construct
TPRVVDR

SEQ ID NO: 195265 - protein, 7 aa, synthetic construct
TGKVYSN

SEQ ID NO: 195266 - protein, 7 aa, synthetic construct
TGKNESR

SEQ ID NO: 195267 - protein, 7 aa, synthetic construct
QLRNDSR

SEQ ID NO: 195268 - protein, 7 aa, synthetic construct
FGRVVSA

SEQ ID NO: 195269 - protein, 7 aa, synthetic construct
MGKTDSR

SEQ ID NO: 195270 - protein, 7 aa, synthetic construct
GGRVDKT

SEQ ID NO: 195271 - protein, 7 aa, synthetic construct
IGRVSSP

SEQ ID NO: 195272 - protein, 7 aa, synthetic construct
TGRKESV

SEQ ID NO: 195273 - protein, 7 aa, synthetic construct
TGRTDKA

SEQ ID NO: 195274 - protein, 7 aa, synthetic construct
TSRVQSN

SEQ ID NO: 195275 - protein, 7 aa, synthetic construct
FKRDDSR

SEQ ID NO: 195276 - protein, 7 aa, synthetic construct
TGRVLEK

SEQ ID NO: 195277 - protein, 7 aa, synthetic construct
TSRIESR

SEQ ID NO: 195278 - protein, 7 aa, synthetic construct
TGEVTRR

SEQ ID NO: 195279 - protein, 7 aa, synthetic construct
TARVTER

SEQ ID NO: 195280 - protein, 7 aa, synthetic construct
RGRQDSV

SEQ ID NO: 195281 - protein, 7 aa, synthetic construct
IKHVDSR

SEQ ID NO: 195282 - protein, 7 aa, synthetic construct
TGRESLR

SEQ ID NO: 195283 - protein, 7 aa, synthetic construct
TGKVYER

SEQ ID NO: 195284 - protein, 7 aa, synthetic construct
TPRKDSM

SEQ ID NO: 195285 - protein, 7 aa, synthetic construct
TTRVNER

SEQ ID NO: 195286 - protein, 7 aa, synthetic construct
QARADSR

SEQ ID NO: 195287 - protein, 7 aa, synthetic construct
TFRETSR

SEQ ID NO: 195288 - protein, 7 aa, synthetic construct
KDRIDSR

SEQ ID NO: 195289 - protein, 7 aa, synthetic construct
QERVQSR

SEQ ID NO: 195290 - protein, 7 aa, synthetic construct
TGRPDRL

SEQ ID NO: 195291 - protein, 7 aa, synthetic construct
TGRVNKD

SEQ ID NO: 195292 - protein, 7 aa, synthetic construct
QKMVDSR

SEQ ID NO: 195293 - protein, 7 aa, synthetic construct
YGRNDAR

SEQ ID NO: 195294 - protein, 7 aa, synthetic construct
ITRADSR

SEQ ID NO: 195295 - protein, 7 aa, synthetic construct
TRANDSR

SEQ ID NO: 195296 - protein, 7 aa, synthetic construct
TSHVQSR

SEQ ID NO: 195297 - protein, 7 aa, synthetic construct
LGRVASQ

SEQ ID NO: 195298 - protein, 7 aa, synthetic construct
TGNKDLR

SEQ ID NO: 195299 - protein, 7 aa, synthetic construct
TGRSTST

SEQ ID NO: 195300 - protein, 7 aa, synthetic construct
TGKTDYR

SEQ ID NO: 195301 - protein, 7 aa, synthetic construct
TQRNDAR

SEQ ID NO: 195302 - protein, 7 aa, synthetic construct
GGRVEAR

SEQ ID NO: 195303 - protein, 7 aa, synthetic construct
KQSVDSR

SEQ ID NO: 195304 - protein, 7 aa, synthetic construct
MGRVLSS

SEQ ID NO: 195305 - protein, 7 aa, synthetic construct
YPRTDSR

SEQ ID NO: 195306 - protein, 7 aa, synthetic construct
TDRGQSR

SEQ ID NO: 195307 - protein, 7 aa, synthetic construct
TKRLDSG

SEQ ID NO: 195308 - protein, 7 aa, synthetic construct
QQKVDSR

SEQ ID NO: 195309 - protein, 7 aa, synthetic construct
FGVKDSR

SEQ ID NO: 195310 - protein, 7 aa, synthetic construct
TDREKSR

SEQ ID NO: 195311 - protein, 7 aa, synthetic construct
MGRNDSK

SEQ ID NO: 195312 - protein, 7 aa, synthetic construct
NARGDSR

SEQ ID NO: 195313 - protein, 7 aa, synthetic construct
TGRTDKS

SEQ ID NO: 195314 - protein, 7 aa, synthetic construct
TKFQDSR

SEQ ID NO: 195315 - protein, 7 aa, synthetic construct
TGRGSSM

SEQ ID NO: 195316 - protein, 7 aa, synthetic construct
TERVPMR

SEQ ID NO: 195317 - protein, 7 aa, synthetic construct
TADVKSR

SEQ ID NO: 195318 - protein, 7 aa, synthetic construct
MSRTDSR

SEQ ID NO: 195319 - protein, 7 aa, synthetic construct
TDRVRSI

SEQ ID NO: 195320 - protein, 7 aa, synthetic construct
TGRVKDN

SEQ ID NO: 195321 - protein, 7 aa, synthetic construct
IGRVNSL

SEQ ID NO: 195322 - protein, 7 aa, synthetic construct
TKREDSK

SEQ ID NO: 195323 - protein, 7 aa, synthetic construct
TNRPDSR

SEQ ID NO: 195324 - protein, 7 aa, synthetic construct
TGRQVDR

SEQ ID NO: 195325 - protein, 7 aa, synthetic construct
SRGVDSR

SEQ ID NO: 195326 - protein, 7 aa, synthetic construct
AKRVDSA

SEQ ID NO: 195327 - protein, 7 aa, synthetic construct
RGTVESR

SEQ ID NO: 195328 - protein, 7 aa, synthetic construct
KGRVDPS

SEQ ID NO: 195329 - protein, 7 aa, synthetic construct
QGRVGER

SEQ ID NO: 195330 - protein, 7 aa, synthetic construct
MGRVDKS

SEQ ID NO: 195331 - protein, 7 aa, synthetic construct
VPRMDSR

SEQ ID NO: 195332 - protein, 7 aa, synthetic construct
TGRVSHG

SEQ ID NO: 195333 - protein, 7 aa, synthetic construct
IGRVTER

SEQ ID NO: 195334 - protein, 7 aa, synthetic construct
THKLDSR

SEQ ID NO: 195335 - protein, 7 aa, synthetic construct
TERTVSR

SEQ ID NO: 195336 - protein, 7 aa, synthetic construct
TTRVPDR

SEQ ID NO: 195337 - protein, 7 aa, synthetic construct
TERVPTR

SEQ ID NO: 195338 - protein, 7 aa, synthetic construct
HKTVDSR

SEQ ID NO: 195339 - protein, 7 aa, synthetic construct
FKQVDSR

SEQ ID NO: 195340 - protein, 7 aa, synthetic construct
HGRVGSG

SEQ ID NO: 195341 - protein, 7 aa, synthetic construct
KGRVISE

SEQ ID NO: 195342 - protein, 7 aa, synthetic construct
TGRPSER

SEQ ID NO: 195343 - protein, 7 aa, synthetic construct
GGRTDLR

SEQ ID NO: 195344 - protein, 7 aa, synthetic construct
ISRTDSR

SEQ ID NO: 195345 - protein, 7 aa, synthetic construct
GKRVDSV

SEQ ID NO: 195346 - protein, 7 aa, synthetic construct
FGRVNSS

SEQ ID NO: 195347 - protein, 7 aa, synthetic construct
YSRVDAR

SEQ ID NO: 195348 - protein, 7 aa, synthetic construct
RNPVDSR

SEQ ID NO: 195349 - protein, 7 aa, synthetic construct
TRAVDGR

SEQ ID NO: 195350 - protein, 7 aa, synthetic construct
KHAVDSR

SEQ ID NO: 195351 - protein, 7 aa, synthetic construct
TGKTDNR

SEQ ID NO: 195352 - protein, 7 aa, synthetic construct
TGRGHSG

SEQ ID NO: 195353 - protein, 7 aa, synthetic construct
TTRTDNR

SEQ ID NO: 195354 - protein, 7 aa, synthetic construct
LARVDSK

SEQ ID NO: 195355 - protein, 7 aa, synthetic construct
HGRVTSA

SEQ ID NO: 195356 - protein, 7 aa, synthetic construct
TDRVNNR

SEQ ID NO: 195357 - protein, 7 aa, synthetic construct
QGRVSSL

SEQ ID NO: 195358 - protein, 7 aa, synthetic construct
IGRVHST

SEQ ID NO: 195359 - protein, 7 aa, synthetic construct
LGRVDRA

SEQ ID NO: 195360 - protein, 7 aa, synthetic construct
MGRVSSN

SEQ ID NO: 195361 - protein, 7 aa, synthetic construct
TRMVDSK

SEQ ID NO: 195362 - protein, 7 aa, synthetic construct
KGRNDSP

SEQ ID NO: 195363 - protein, 7 aa, synthetic construct
TNRVETR

SEQ ID NO: 195364 - protein, 7 aa, synthetic construct
FGRVVSS

SEQ ID NO: 195365 - protein, 7 aa, synthetic construct
TSRVRSE

SEQ ID NO: 195366 - protein, 7 aa, synthetic construct
TARQDSK

SEQ ID NO: 195367 - protein, 7 aa, synthetic construct
FGKLDSR

SEQ ID NO: 195368 - protein, 7 aa, synthetic construct
AGKVDYR

SEQ ID NO: 195369 - protein, 7 aa, synthetic construct
TGRVKDF

SEQ ID NO: 195370 - protein, 7 aa, synthetic construct
TGANDRR

SEQ ID NO: 195371 - protein, 7 aa, synthetic construct
YGRVASG

SEQ ID NO: 195372 - protein, 7 aa, synthetic construct
AGRVAER

SEQ ID NO: 195373 - protein, 7 aa, synthetic construct
FGRVNSA

SEQ ID NO: 195374 - protein, 7 aa, synthetic construct
TTSVDRR

SEQ ID NO: 195375 - protein, 7 aa, synthetic construct
TGRVNHG

SEQ ID NO: 195376 - protein, 7 aa, synthetic construct
TDNVKSR

SEQ ID NO: 195377 - protein, 7 aa, synthetic construct
TERVNAR

SEQ ID NO: 195378 - protein, 7 aa, synthetic construct
EGKVVSR

SEQ ID NO: 195379 - protein, 7 aa, synthetic construct
TLRQESR

SEQ ID NO: 195380 - protein, 7 aa, synthetic construct
SGRVTDR

SEQ ID NO: 195381 - protein, 7 aa, synthetic construct
TQEVKSR

SEQ ID NO: 195382 - protein, 7 aa, synthetic construct
TGRVKLD

SEQ ID NO: 195383 - protein, 7 aa, synthetic construct
TVRNESR

SEQ ID NO: 195384 - protein, 7 aa, synthetic construct
IGRMDAR

SEQ ID NO: 195385 - protein, 7 aa, synthetic construct
TARSDVR

SEQ ID NO: 195386 - protein, 7 aa, synthetic construct
TGREFSK

SEQ ID NO: 195387 - protein, 7 aa, synthetic construct
TGRIDRS

SEQ ID NO: 195388 - protein, 7 aa, synthetic construct
TGRLDKT

SEQ ID NO: 195389 - protein, 7 aa, synthetic construct
IGRESSR

SEQ ID NO: 195390 - protein, 7 aa, synthetic construct
TGRTTSI

SEQ ID NO: 195391 - protein, 7 aa, synthetic construct
TGRMKSD

SEQ ID NO: 195392 - protein, 7 aa, synthetic construct
VGRMDVR

SEQ ID NO: 195393 - protein, 7 aa, synthetic construct
LGRVISQ

SEQ ID NO: 195394 - protein, 7 aa, synthetic construct
TGKMDGR

SEQ ID NO: 195395 - protein, 7 aa, synthetic construct
TERVSNR

SEQ ID NO: 195396 - protein, 7 aa, synthetic construct
VNRMDSR

SEQ ID NO: 195397 - protein, 7 aa, synthetic construct
TGREKSL

SEQ ID NO: 195398 - protein, 7 aa, synthetic construct
KSRVDSL

SEQ ID NO: 195399 - protein, 7 aa, synthetic construct
VVRSDSR

SEQ ID NO: 195400 - protein, 7 aa, synthetic construct
TAREISR

SEQ ID NO: 195401 - protein, 7 aa, synthetic construct
VGRVDVR

SEQ ID NO: 195402 - protein, 7 aa, synthetic construct
MLRSDSR

SEQ ID NO: 195403 - protein, 7 aa, synthetic construct
AGRGDTR

SEQ ID NO: 195404 - protein, 7 aa, synthetic construct
TGRVNNL

SEQ ID NO: 195405 - protein, 7 aa, synthetic construct
MGRTDIR

SEQ ID NO: 195406 - protein, 7 aa, synthetic construct
TGRVQNN

SEQ ID NO: 195407 - protein, 7 aa, synthetic construct
IARNDSR

SEQ ID NO: 195408 - protein, 7 aa, synthetic construct
TGRDKSN

SEQ ID NO: 195409 - protein, 7 aa, synthetic construct
KGRTDSF

SEQ ID NO: 195410 - protein, 7 aa, synthetic construct
QMRTDSR

SEQ ID NO: 195411 - protein, 7 aa, synthetic construct
TGRVSPA

SEQ ID NO: 195412 - protein, 7 aa, synthetic construct
TPRSESR

SEQ ID NO: 195413 - protein, 7 aa, synthetic construct
TTRSDNR

SEQ ID NO: 195414 - protein, 7 aa, synthetic construct
TVRQDNR

SEQ ID NO: 195415 - protein, 7 aa, synthetic construct
QGAVDKR

SEQ ID NO: 195416 - protein, 7 aa, synthetic construct
TIRPESR

SEQ ID NO: 195417 - protein, 7 aa, synthetic construct
TTRNDMR

SEQ ID NO: 195418 - protein, 7 aa, synthetic construct
LGRVSSI

SEQ ID NO: 195419 - protein, 7 aa, synthetic construct
KGRVESM

SEQ ID NO: 195420 - protein, 7 aa, synthetic construct
NPRMDSR

SEQ ID NO: 195421 - protein, 7 aa, synthetic construct
TGRKDTV

SEQ ID NO: 195422 - protein, 7 aa, synthetic construct
TARSDSK

SEQ ID NO: 195423 - protein, 7 aa, synthetic construct
TGKVDRQ

SEQ ID NO: 195424 - protein, 7 aa, synthetic construct
IGRVISG

SEQ ID NO: 195425 - protein, 7 aa, synthetic construct
TTRSDLR

SEQ ID NO: 195426 - protein, 7 aa, synthetic construct
HGPVASR

SEQ ID NO: 195427 - protein, 7 aa, synthetic construct
TERVAMR

SEQ ID NO: 195428 - protein, 7 aa, synthetic construct
TGSVGHR

SEQ ID NO: 195429 - protein, 7 aa, synthetic construct
TLRNDTR

SEQ ID NO: 195430 - protein, 7 aa, synthetic construct
HGKVDGR

SEQ ID NO: 195431 - protein, 7 aa, synthetic construct
TGKYDQR

SEQ ID NO: 195432 - protein, 7 aa, synthetic construct
TKRVLSE

SEQ ID NO: 195433 - protein, 7 aa, synthetic construct
AGRNDLR

SEQ ID NO: 195434 - protein, 7 aa, synthetic construct
VTRNDSR

SEQ ID NO: 195435 - protein, 7 aa, synthetic construct
TTREDKR

SEQ ID NO: 195436 - protein, 7 aa, synthetic construct
VGRVTDR

SEQ ID NO: 195437 - protein, 7 aa, synthetic construct
TGRTDRI

SEQ ID NO: 195438 - protein, 7 aa, synthetic construct
TGKRDSV

SEQ ID NO: 195439 - protein, 7 aa, synthetic construct
TGRVEMR

SEQ ID NO: 195440 - protein, 7 aa, synthetic construct
VPRVDTR

SEQ ID NO: 195441 - protein, 7 aa, synthetic construct
TKSVDYR

SEQ ID NO: 195442 - protein, 7 aa, synthetic construct
KGRVDAV

SEQ ID NO: 195443 - protein, 7 aa, synthetic construct
KLREDSR

SEQ ID NO: 195444 - protein, 7 aa, synthetic construct
DGRVKSI

SEQ ID NO: 195445 - protein, 7 aa, synthetic construct
KMNVDSR

SEQ ID NO: 195446 - protein, 7 aa, synthetic construct
TSRVDRM

SEQ ID NO: 195447 - protein, 7 aa, synthetic construct
TNRMESR

SEQ ID NO: 195448 - protein, 7 aa, synthetic construct
TPRVLDR

SEQ ID NO: 195449 - protein, 7 aa, synthetic construct
KGGVESR

SEQ ID NO: 195450 - protein, 7 aa, synthetic construct
TGRSSSI

SEQ ID NO: 195451 - protein, 7 aa, synthetic construct
TTRVDRM

SEQ ID NO: 195452 - protein, 7 aa, synthetic construct
MGRADSK

SEQ ID NO: 195453 - protein, 7 aa, synthetic construct
TRNVDSR

SEQ ID NO: 195454 - protein, 7 aa, synthetic construct
TDRVSLR

SEQ ID NO: 195455 - protein, 7 aa, synthetic construct
TGRASSA

SEQ ID NO: 195456 - protein, 7 aa, synthetic construct
MGRVMSA

SEQ ID NO: 195457 - protein, 7 aa, synthetic construct
TERVPQR

SEQ ID NO: 195458 - protein, 7 aa, synthetic construct
KGSVDNR

SEQ ID NO: 195459 - protein, 7 aa, synthetic construct
TGRGDTK

SEQ ID NO: 195460 - protein, 7 aa, synthetic construct
GRTVDSR

SEQ ID NO: 195461 - protein, 7 aa, synthetic construct
VMRSDSR

SEQ ID NO: 195462 - protein, 7 aa, synthetic construct
TGKVYST

SEQ ID NO: 195463 - protein, 7 aa, synthetic construct
TGRVTSA

SEQ ID NO: 195464 - protein, 7 aa, synthetic construct
KGNVESR

SEQ ID NO: 195465 - protein, 7 aa, synthetic construct
TGREKSG

SEQ ID NO: 195466 - protein, 7 aa, synthetic construct
TKRVDQM

SEQ ID NO: 195467 - protein, 7 aa, synthetic construct
TDRMVSR

SEQ ID NO: 195468 - protein, 7 aa, synthetic construct
VIRGDSR

SEQ ID NO: 195469 - protein, 7 aa, synthetic construct
NERVSSR

SEQ ID NO: 195470 - protein, 7 aa, synthetic construct
YGRDDKR

SEQ ID NO: 195471 - protein, 7 aa, synthetic construct
AGRVNER

SEQ ID NO: 195472 - protein, 7 aa, synthetic construct
TARVDPR

SEQ ID NO: 195473 - protein, 7 aa, synthetic construct
KGRVDMG

SEQ ID NO: 195474 - protein, 7 aa, synthetic construct
FGRVLSN

SEQ ID NO: 195475 - protein, 7 aa, synthetic construct
TARTESR

SEQ ID NO: 195476 - protein, 7 aa, synthetic construct
SARVESR

SEQ ID NO: 195477 - protein, 7 aa, synthetic construct
TGRPTSN

SEQ ID NO: 195478 - protein, 7 aa, synthetic construct
TGPHISR

SEQ ID NO: 195479 - protein, 7 aa, synthetic construct
TKRVDSG

SEQ ID NO: 195480 - protein, 7 aa, synthetic construct
IGRVVSM

SEQ ID NO: 195481 - protein, 7 aa, synthetic construct
AGRKDSI

SEQ ID NO: 195482 - protein, 7 aa, synthetic construct
QGRVDAK

SEQ ID NO: 195483 - protein, 7 aa, synthetic construct
VGREDKR

SEQ ID NO: 195484 - protein, 7 aa, synthetic construct
TGRDSSK

SEQ ID NO: 195485 - protein, 7 aa, synthetic construct
IGRVTSL

SEQ ID NO: 195486 - protein, 7 aa, synthetic construct
TIRNDSK

SEQ ID NO: 195487 - protein, 7 aa, synthetic construct
TGRVIKE

SEQ ID NO: 195488 - protein, 7 aa, synthetic construct
RGRVDNP

SEQ ID NO: 195489 - protein, 7 aa, synthetic construct
QGRGDAR

SEQ ID NO: 195490 - protein, 7 aa, synthetic construct
QIRADSR

SEQ ID NO: 195491 - protein, 7 aa, synthetic construct
TGRTDGK

SEQ ID NO: 195492 - protein, 7 aa, synthetic construct
LTRVDSK

SEQ ID NO: 195493 - protein, 7 aa, synthetic construct
TGRPDRI

SEQ ID NO: 195494 - protein, 7 aa, synthetic construct
TERNNSR

SEQ ID NO: 195495 - protein, 7 aa, synthetic construct
EGRVKSP

SEQ ID NO: 195496 - protein, 7 aa, synthetic construct
TGRNDAR

SEQ ID NO: 195497 - protein, 7 aa, synthetic construct
SGRVDTR

SEQ ID NO: 195498 - protein, 7 aa, synthetic construct
TGRPTSL

SEQ ID NO: 195499 - protein, 7 aa, synthetic construct
RGAVDSR

SEQ ID NO: 195500 - protein, 7 aa, synthetic construct
LGGKDSR

SEQ ID NO: 195501 - protein, 7 aa, synthetic construct
TGRIDGK

SEQ ID NO: 195502 - protein, 7 aa, synthetic construct
TGRTDKG

SEQ ID NO: 195503 - protein, 7 aa, synthetic construct
TVRNDLR

SEQ ID NO: 195504 - protein, 7 aa, synthetic construct
TGRPQER

SEQ ID NO: 195505 - protein, 7 aa, synthetic construct
QIRGDSR

SEQ ID NO: 195506 - protein, 7 aa, synthetic construct
TNRVAER

SEQ ID NO: 195507 - protein, 7 aa, synthetic construct
TGKYDTR

SEQ ID NO: 195508 - protein, 7 aa, synthetic construct
TKRLDSV

SEQ ID NO: 195509 - protein, 7 aa, synthetic construct
STRADSR

SEQ ID NO: 195510 - protein, 7 aa, synthetic construct
TGRVNAG

SEQ ID NO: 195511 - protein, 7 aa, synthetic construct
FGRVNSI

SEQ ID NO: 195512 - protein, 7 aa, synthetic construct
YNRVDSK

SEQ ID NO: 195513 - protein, 7 aa, synthetic construct
TGRQELR

SEQ ID NO: 195514 - protein, 7 aa, synthetic construct
QGRVDMR

SEQ ID NO: 195515 - protein, 7 aa, synthetic construct
QGRVEVR

SEQ ID NO: 195516 - protein, 7 aa, synthetic construct
KSRVDSG

SEQ ID NO: 195517 - protein, 7 aa, synthetic construct
TQKYDSR

SEQ ID NO: 195518 - protein, 7 aa, synthetic construct
TMRVDKL

SEQ ID NO: 195519 - protein, 7 aa, synthetic construct
TGEVNRR

SEQ ID NO: 195520 - protein, 7 aa, synthetic construct
RTGVDSR

SEQ ID NO: 195521 - protein, 7 aa, synthetic construct
AGRVEAR

SEQ ID NO: 195522 - protein, 7 aa, synthetic construct
IGRSDIR

SEQ ID NO: 195523 - protein, 7 aa, synthetic construct
TGRIDKM

SEQ ID NO: 195524 - protein, 7 aa, synthetic construct
TNDVRSR

SEQ ID NO: 195525 - protein, 7 aa, synthetic construct
TKGVDAR

SEQ ID NO: 195526 - protein, 7 aa, synthetic construct
LRAVDSR

SEQ ID NO: 195527 - protein, 7 aa, synthetic construct
TGRAISS

SEQ ID NO: 195528 - protein, 7 aa, synthetic construct
TVREDRR

SEQ ID NO: 195529 - protein, 7 aa, synthetic construct
KGDVGSR

SEQ ID NO: 195530 - protein, 7 aa, synthetic construct
TGRKDVQ

SEQ ID NO: 195531 - protein, 7 aa, synthetic construct
RGSADSR

SEQ ID NO: 195532 - protein, 7 aa, synthetic construct
MGRNESR

SEQ ID NO: 195533 - protein, 7 aa, synthetic construct
TERVEKR

SEQ ID NO: 195534 - protein, 7 aa, synthetic construct
TQDVKSR

SEQ ID NO: 195535 - protein, 7 aa, synthetic construct
MVRADSR

SEQ ID NO: 195536 - protein, 7 aa, synthetic construct
VGRVSSQ

SEQ ID NO: 195537 - protein, 7 aa, synthetic construct
TKRVDPP

SEQ ID NO: 195538 - protein, 7 aa, synthetic construct
FGRVLSS

SEQ ID NO: 195539 - protein, 7 aa, synthetic construct
TTRVDKM

SEQ ID NO: 195540 - protein, 7 aa, synthetic construct
LGSKDSR

SEQ ID NO: 195541 - protein, 7 aa, synthetic construct
TQRVDAK

SEQ ID NO: 195542 - protein, 7 aa, synthetic construct
IGRADAR

SEQ ID NO: 195543 - protein, 7 aa, synthetic construct
DGGVKSR

SEQ ID NO: 195544 - protein, 7 aa, synthetic construct
KVRVDSL

SEQ ID NO: 195545 - protein, 7 aa, synthetic construct
TERVVAR

SEQ ID NO: 195546 - protein, 7 aa, synthetic construct
TPRVIDR

SEQ ID NO: 195547 - protein, 7 aa, synthetic construct
TGRQIDR

SEQ ID NO: 195548 - protein, 7 aa, synthetic construct
TGTHNSR

SEQ ID NO: 195549 - protein, 7 aa, synthetic construct
TGEVKMR

SEQ ID NO: 195550 - protein, 7 aa, synthetic construct
QGRVASG

SEQ ID NO: 195551 - protein, 7 aa, synthetic construct
FGRVASG

SEQ ID NO: 195552 - protein, 7 aa, synthetic construct
MGRVNSA

SEQ ID NO: 195553 - protein, 7 aa, synthetic construct
FGRVTSN

SEQ ID NO: 195554 - protein, 7 aa, synthetic construct
TGRVIHA

SEQ ID NO: 195555 - protein, 7 aa, synthetic construct
MNRGDSR

SEQ ID NO: 195556 - protein, 7 aa, synthetic construct
DGNVKSR

SEQ ID NO: 195557 - protein, 7 aa, synthetic construct
RPRDDSR

SEQ ID NO: 195558 - protein, 7 aa, synthetic construct
SGRVEVR

SEQ ID NO: 195559 - protein, 7 aa, synthetic construct
YGRTESR

SEQ ID NO: 195560 - protein, 7 aa, synthetic construct
KVGVDSR

SEQ ID NO: 195561 - protein, 7 aa, synthetic construct
YGRVDVR

SEQ ID NO: 195562 - protein, 7 aa, synthetic construct
FGGVDKR

SEQ ID NO: 195563 - protein, 7 aa, synthetic construct
TGRGVSN

SEQ ID NO: 195564 - protein, 7 aa, synthetic construct
TGRPNER

SEQ ID NO: 195565 - protein, 7 aa, synthetic construct
LKQVDSR

SEQ ID NO: 195566 - protein, 7 aa, synthetic construct
TTRADNR

SEQ ID NO: 195567 - protein, 7 aa, synthetic construct
TGKNDNR

SEQ ID NO: 195568 - protein, 7 aa, synthetic construct
TGRMTSN

SEQ ID NO: 195569 - protein, 7 aa, synthetic construct
MERVASR

SEQ ID NO: 195570 - protein, 7 aa, synthetic construct
TGRVEGK

SEQ ID NO: 195571 - protein, 7 aa, synthetic construct
IGARDSR

SEQ ID NO: 195572 - protein, 7 aa, synthetic construct
TVRSDSR

SEQ ID NO: 195573 - protein, 7 aa, synthetic construct
QGRTESR

SEQ ID NO: 195574 - protein, 7 aa, synthetic construct
DKRVDTR

SEQ ID NO: 195575 - protein, 7 aa, synthetic construct
TDRVNTR

SEQ ID NO: 195576 - protein, 7 aa, synthetic construct
SGRKDSI

SEQ ID NO: 195577 - protein, 7 aa, synthetic construct
TGRNMER

SEQ ID NO: 195578 - protein, 7 aa, synthetic construct
TPDVKSR

SEQ ID NO: 195579 - protein, 7 aa, synthetic construct
TGREISR

SEQ ID NO: 195580 - protein, 7 aa, synthetic construct
TGRNDKN

SEQ ID NO: 195581 - protein, 7 aa, synthetic construct
TVRKDST

SEQ ID NO: 195582 - protein, 7 aa, synthetic construct
LGRVTSG

SEQ ID NO: 195583 - protein, 7 aa, synthetic construct
TGRTIER

SEQ ID NO: 195584 - protein, 7 aa, synthetic construct
RGVVESR

SEQ ID NO: 195585 - protein, 7 aa, synthetic construct
TSKGDSR

SEQ ID NO: 195586 - protein, 7 aa, synthetic construct
TGKMDMR

SEQ ID NO: 195587 - protein, 7 aa, synthetic construct
MGRVNSN

SEQ ID NO: 195588 - protein, 7 aa, synthetic construct
MGKVDIR

SEQ ID NO: 195589 - protein, 7 aa, synthetic construct
LDRVVSR

SEQ ID NO: 195590 - protein, 7 aa, synthetic construct
IGKVDFR

SEQ ID NO: 195591 - protein, 7 aa, synthetic construct
KQRVDSS

SEQ ID NO: 195592 - protein, 7 aa, synthetic construct
TKRSDSV

SEQ ID NO: 195593 - protein, 7 aa, synthetic construct
IGRVDVR

SEQ ID NO: 195594 - protein, 7 aa, synthetic construct
TERQTSR

SEQ ID NO: 195595 - protein, 7 aa, synthetic construct
KGPQDSR

SEQ ID NO: 195596 - protein, 7 aa, synthetic construct
VGRIDTR

SEQ ID NO: 195597 - protein, 7 aa, synthetic construct
VGRVSSN

SEQ ID NO: 195598 - protein, 7 aa, synthetic construct
TVRVSER

SEQ ID NO: 195599 - protein, 7 aa, synthetic construct
TGRDKSV

SEQ ID NO: 195600 - protein, 7 aa, synthetic construct
TGRVVHG

SEQ ID NO: 195601 - protein, 7 aa, synthetic construct
LGKVDLR

SEQ ID NO: 195602 - protein, 7 aa, synthetic construct
TGNVDKR

SEQ ID NO: 195603 - protein, 7 aa, synthetic construct
TGRADRQ

SEQ ID NO: 195604 - protein, 7 aa, synthetic construct
TDRVNAR

SEQ ID NO: 195605 - protein, 7 aa, synthetic construct
TPRGESR

SEQ ID NO: 195606 - protein, 7 aa, synthetic construct
TGRGISQ

SEQ ID NO: 195607 - protein, 7 aa, synthetic construct
TMRKDSF

SEQ ID NO: 195608 - protein, 7 aa, synthetic construct
QGKLDSR

SEQ ID NO: 195609 - protein, 7 aa, synthetic construct
TERVISK

SEQ ID NO: 195610 - protein, 7 aa, synthetic construct
LGRVDKP

SEQ ID NO: 195611 - protein, 7 aa, synthetic construct
TGKIESR

SEQ ID NO: 195612 - protein, 7 aa, synthetic construct
TERVVNR

SEQ ID NO: 195613 - protein, 7 aa, synthetic construct
TGRSSSL

SEQ ID NO: 195614 - protein, 7 aa, synthetic construct
TSRNDVR

SEQ ID NO: 195615 - protein, 7 aa, synthetic construct
TGRADRS

SEQ ID NO: 195616 - protein, 7 aa, synthetic construct
TTRNESR

SEQ ID NO: 195617 - protein, 7 aa, synthetic construct
TGRKDIV

SEQ ID NO: 195618 - protein, 7 aa, synthetic construct
TGRQDKL

SEQ ID NO: 195619 - protein, 7 aa, synthetic construct
TGTVEKR

SEQ ID NO: 195620 - protein, 7 aa, synthetic construct
KGRVMSE

SEQ ID NO: 195621 - protein, 7 aa, synthetic construct
TGRNDKQ

SEQ ID NO: 195622 - protein, 7 aa, synthetic construct
AGRVDNR

SEQ ID NO: 195623 - protein, 7 aa, synthetic construct
LGRVNER

SEQ ID NO: 195624 - protein, 7 aa, synthetic construct
QTRVDSR

SEQ ID NO: 195625 - protein, 7 aa, synthetic construct
TGRVHLG

SEQ ID NO: 195626 - protein, 7 aa, synthetic construct
TGRNLER

SEQ ID NO: 195627 - protein, 7 aa, synthetic construct
TGRKDPI

SEQ ID NO: 195628 - protein, 7 aa, synthetic construct
TGRVLHG

SEQ ID NO: 195629 - protein, 7 aa, synthetic construct
SGRVHSV

SEQ ID NO: 195630 - protein, 7 aa, synthetic construct
VKRVDSI

SEQ ID NO: 195631 - protein, 7 aa, synthetic construct
TGRLRSE

SEQ ID NO: 195632 - protein, 7 aa, synthetic construct
AGRVMER

SEQ ID NO: 195633 - protein, 7 aa, synthetic construct
TSRTDGR

SEQ ID NO: 195634 - protein, 7 aa, synthetic construct
KGREDNR

SEQ ID NO: 195635 - protein, 7 aa, synthetic construct
TTRESSR

SEQ ID NO: 195636 - protein, 7 aa, synthetic construct
MGRVNSS

SEQ ID NO: 195637 - protein, 7 aa, synthetic construct
VGRGDSR

SEQ ID NO: 195638 - protein, 7 aa, synthetic construct
IGRVHSV

SEQ ID NO: 195639 - protein, 7 aa, synthetic construct
KDRVDMR

SEQ ID NO: 195640 - protein, 7 aa, synthetic construct
AGRVDKA

SEQ ID NO: 195641 - protein, 7 aa, synthetic construct
TGRNHSG

SEQ ID NO: 195642 - protein, 7 aa, synthetic construct
LQRADSR

SEQ ID NO: 195643 - protein, 7 aa, synthetic construct
TGRGDKY

SEQ ID NO: 195644 - protein, 7 aa, synthetic construct
MPRSDSR

SEQ ID NO: 195645 - protein, 7 aa, synthetic construct
FGRKDSA

SEQ ID NO: 195646 - protein, 7 aa, synthetic construct
TGKVEHR

SEQ ID NO: 195647 - protein, 7 aa, synthetic construct
LPRVDNR

SEQ ID NO: 195648 - protein, 7 aa, synthetic construct
TGRVHTT

SEQ ID NO: 195649 - protein, 7 aa, synthetic construct
TGRNDRG

SEQ ID NO: 195650 - protein, 7 aa, synthetic construct
MGRQDLR

SEQ ID NO: 195651 - protein, 7 aa, synthetic construct
TKREESR

SEQ ID NO: 195652 - protein, 7 aa, synthetic construct
TRGADSR

SEQ ID NO: 195653 - protein, 7 aa, synthetic construct
KGHVDAR

SEQ ID NO: 195654 - protein, 7 aa, synthetic construct
VTRVDTR

SEQ ID NO: 195655 - protein, 7 aa, synthetic construct
LGREVSR

SEQ ID NO: 195656 - protein, 7 aa, synthetic construct
KGHVDSK

SEQ ID NO: 195657 - protein, 7 aa, synthetic construct
LNRNDSR

SEQ ID NO: 195658 - protein, 7 aa, synthetic construct
ADRVASR

SEQ ID NO: 195659 - protein, 7 aa, synthetic construct
YGAKDSR

SEQ ID NO: 195660 - protein, 7 aa, synthetic construct
TEKVDRR

SEQ ID NO: 195661 - protein, 7 aa, synthetic construct
THRVSSS

SEQ ID NO: 195662 - protein, 7 aa, synthetic construct
TQRPESR

SEQ ID NO: 195663 - protein, 7 aa, synthetic construct
TNRVEMR

SEQ ID NO: 195664 - protein, 7 aa, synthetic construct
TSRNDSR

SEQ ID NO: 195665 - protein, 7 aa, synthetic construct
TARVMDR

SEQ ID NO: 195666 - protein, 7 aa, synthetic construct
TERSISR

SEQ ID NO: 195667 - protein, 7 aa, synthetic construct
TGVADKR

SEQ ID NO: 195668 - protein, 7 aa, synthetic construct
TIAVDKR

SEQ ID NO: 195669 - protein, 7 aa, synthetic construct
LKRVDSM

SEQ ID NO: 195670 - protein, 7 aa, synthetic construct
VTRVDAR

SEQ ID NO: 195671 - protein, 7 aa, synthetic construct
VSRVESR

SEQ ID NO: 195672 - protein, 7 aa, synthetic construct
TGRTDKV

SEQ ID NO: 195673 - protein, 7 aa, synthetic construct
MGRKDSI

SEQ ID NO: 195674 - protein, 7 aa, synthetic construct
GGRVENR

SEQ ID NO: 195675 - protein, 7 aa, synthetic construct
VGRVDKY

SEQ ID NO: 195676 - protein, 7 aa, synthetic construct
TVRVDKY

SEQ ID NO: 195677 - protein, 7 aa, synthetic construct
DVRVGSR

SEQ ID NO: 195678 - protein, 7 aa, synthetic construct
QMRVDSR

SEQ ID NO: 195679 - protein, 7 aa, synthetic construct
TGRVGHG

SEQ ID NO: 195680 - protein, 7 aa, synthetic construct
ADRVGSR

SEQ ID NO: 195681 - protein, 7 aa, synthetic construct
IGSRDSR

SEQ ID NO: 195682 - protein, 7 aa, synthetic construct
NKREDSR

SEQ ID NO: 195683 - protein, 7 aa, synthetic construct
RGAVDGR

SEQ ID NO: 195684 - protein, 7 aa, synthetic construct
TARKDSV

SEQ ID NO: 195685 - protein, 7 aa, synthetic construct
TQRVDKN

SEQ ID NO: 195686 - protein, 7 aa, synthetic construct
TGRTDRQ

SEQ ID NO: 195687 - protein, 7 aa, synthetic construct
TGRVKDT

SEQ ID NO: 195688 - protein, 7 aa, synthetic construct
TERVVSK

SEQ ID NO: 195689 - protein, 7 aa, synthetic construct
TKFSDSR

SEQ ID NO: 195690 - protein, 7 aa, synthetic construct
TGAPDRR

SEQ ID NO: 195691 - protein, 7 aa, synthetic construct
TGRVIAA

SEQ ID NO: 195692 - protein, 7 aa, synthetic construct
IGRVHSA

SEQ ID NO: 195693 - protein, 7 aa, synthetic construct
KVRVDDR

SEQ ID NO: 195694 - protein, 7 aa, synthetic construct
SGRVNSN

SEQ ID NO: 195695 - protein, 7 aa, synthetic construct
IGRVRSE

SEQ ID NO: 195696 - protein, 7 aa, synthetic construct
TDIVKSR

SEQ ID NO: 195697 - protein, 7 aa, synthetic construct
LGREISR

SEQ ID NO: 195698 - protein, 7 aa, synthetic construct
TGRQHSA

SEQ ID NO: 195699 - protein, 7 aa, synthetic construct
FPRADSR

SEQ ID NO: 195700 - protein, 7 aa, synthetic construct
GGRETSR

SEQ ID NO: 195701 - protein, 7 aa, synthetic construct
SGKGDSR

SEQ ID NO: 195702 - protein, 7 aa, synthetic construct
VGRIDQR

SEQ ID NO: 195703 - protein, 7 aa, synthetic construct
FTRADSR

SEQ ID NO: 195704 - protein, 7 aa, synthetic construct
KGNVDPR

SEQ ID NO: 195705 - protein, 7 aa, synthetic construct
TTRAESR

SEQ ID NO: 195706 - protein, 7 aa, synthetic construct
TGGKDSR

SEQ ID NO: 195707 - protein, 7 aa, synthetic construct
TGRVHIG

SEQ ID NO: 195708 - protein, 7 aa, synthetic construct
LGRTDAR

SEQ ID NO: 195709 - protein, 7 aa, synthetic construct
SDRVVSR

SEQ ID NO: 195710 - protein, 7 aa, synthetic construct
FGKNDSR

SEQ ID NO: 195711 - protein, 7 aa, synthetic construct
TGRVHTN

SEQ ID NO: 195712 - protein, 7 aa, synthetic construct
TGRKVSE

SEQ ID NO: 195713 - protein, 7 aa, synthetic construct
KMRVDST

SEQ ID NO: 195714 - protein, 7 aa, synthetic construct
TGRASSG

SEQ ID NO: 195715 - protein, 7 aa, synthetic construct
IGGRDSR

SEQ ID NO: 195716 - protein, 7 aa, synthetic construct
TSRVDKG

SEQ ID NO: 195717 - protein, 7 aa, synthetic construct
TVRVTER

SEQ ID NO: 195718 - protein, 7 aa, synthetic construct
TGREKSM

SEQ ID NO: 195719 - protein, 7 aa, synthetic construct
TSRLESR

SEQ ID NO: 195720 - protein, 7 aa, synthetic construct
TIRKDSV

SEQ ID NO: 195721 - protein, 7 aa, synthetic construct
YGTVHSR

SEQ ID NO: 195722 - protein, 7 aa, synthetic construct
QGRIDGR

SEQ ID NO: 195723 - protein, 7 aa, synthetic construct
TDRVRSG

SEQ ID NO: 195724 - protein, 7 aa, synthetic construct
VGRGDMR

SEQ ID NO: 195725 - protein, 7 aa, synthetic construct
SGRVDGR

SEQ ID NO: 195726 - protein, 7 aa, synthetic construct
TARNDLR

SEQ ID NO: 195727 - protein, 7 aa, synthetic construct
TGKSDTR

SEQ ID NO: 195728 - protein, 7 aa, synthetic construct
VRAVDSR

SEQ ID NO: 195729 - protein, 7 aa, synthetic construct
VGRGESR

SEQ ID NO: 195730 - protein, 7 aa, synthetic construct
GRNVDSR

SEQ ID NO: 195731 - protein, 7 aa, synthetic construct
TLRVRSE

SEQ ID NO: 195732 - protein, 7 aa, synthetic construct
KERVESR

SEQ ID NO: 195733 - protein, 7 aa, synthetic construct
INRVDSR

SEQ ID NO: 195734 - protein, 7 aa, synthetic construct
KGGVDAR

SEQ ID NO: 195735 - protein, 7 aa, synthetic construct
NKRVDSS

SEQ ID NO: 195736 - protein, 7 aa, synthetic construct
TKRIDSS

SEQ ID NO: 195737 - protein, 7 aa, synthetic construct
TNKVDAR

SEQ ID NO: 195738 - protein, 7 aa, synthetic construct
QGRVGSG

SEQ ID NO: 195739 - protein, 7 aa, synthetic construct
IGRGDAR

SEQ ID NO: 195740 - protein, 7 aa, synthetic construct
TQRVEGR

SEQ ID NO: 195741 - protein, 7 aa, synthetic construct
TGNQDKR

SEQ ID NO: 195742 - protein, 7 aa, synthetic construct
KGPMDSR

SEQ ID NO: 195743 - protein, 7 aa, synthetic construct
MGRVDIR

SEQ ID NO: 195744 - protein, 7 aa, synthetic construct
TARSDGR

SEQ ID NO: 195745 - protein, 7 aa, synthetic construct
KGRADSV

SEQ ID NO: 195746 - protein, 7 aa, synthetic construct
RGEVVSR

SEQ ID NO: 195747 - protein, 7 aa, synthetic construct
TERKDLR

SEQ ID NO: 195748 - protein, 7 aa, synthetic construct
VGRVISM

SEQ ID NO: 195749 - protein, 7 aa, synthetic construct
TGRVHGI

SEQ ID NO: 195750 - protein, 7 aa, synthetic construct
ANKVDSR

SEQ ID NO: 195751 - protein, 7 aa, synthetic construct
TGRMDNK

SEQ ID NO: 195752 - protein, 7 aa, synthetic construct
TNKVDHR

SEQ ID NO: 195753 - protein, 7 aa, synthetic construct
VGKVDLR

SEQ ID NO: 195754 - protein, 7 aa, synthetic construct
VNRIDSR

SEQ ID NO: 195755 - protein, 7 aa, synthetic construct
DARVVSR

SEQ ID NO: 195756 - protein, 7 aa, synthetic construct
HGRVDKI

SEQ ID NO: 195757 - protein, 7 aa, synthetic construct
TKRQDSG

SEQ ID NO: 195758 - protein, 7 aa, synthetic construct
FGKVDLR

SEQ ID NO: 195759 - protein, 7 aa, synthetic construct
VGRVTSA

SEQ ID NO: 195760 - protein, 7 aa, synthetic construct
TQRVLER

SEQ ID NO: 195761 - protein, 7 aa, synthetic construct
TGRVNDR

SEQ ID NO: 195762 - protein, 7 aa, synthetic construct
TGRQEIR

SEQ ID NO: 195763 - protein, 7 aa, synthetic construct
TARVHSN

SEQ ID NO: 195764 - protein, 7 aa, synthetic construct
MGRVDKH

SEQ ID NO: 195765 - protein, 7 aa, synthetic construct
TVRVGER

SEQ ID NO: 195766 - protein, 7 aa, synthetic construct
TGRVDRS

SEQ ID NO: 195767 - protein, 7 aa, synthetic construct
LGRVTSQ

SEQ ID NO: 195768 - protein, 7 aa, synthetic construct
TGDVRTR

SEQ ID NO: 195769 - protein, 7 aa, synthetic construct
TERVIGR

SEQ ID NO: 195770 - protein, 7 aa, synthetic construct
TGRVSHV

SEQ ID NO: 195771 - protein, 7 aa, synthetic construct
GGRVDAR

SEQ ID NO: 195772 - protein, 7 aa, synthetic construct
TLRKDSM

SEQ ID NO: 195773 - protein, 7 aa, synthetic construct
YKMVDSR

SEQ ID NO: 195774 - protein, 7 aa, synthetic construct
KSRVDSA

SEQ ID NO: 195775 - protein, 7 aa, synthetic construct
TGDVKYR

SEQ ID NO: 195776 - protein, 7 aa, synthetic construct
IGRVTSY

SEQ ID NO: 195777 - protein, 7 aa, synthetic construct
QVRQDSR

SEQ ID NO: 195778 - protein, 7 aa, synthetic construct
TPRKDSF

SEQ ID NO: 195779 - protein, 7 aa, synthetic construct
VARVESR

SEQ ID NO: 195780 - protein, 7 aa, synthetic construct
TTRVHSI

SEQ ID NO: 195781 - protein, 7 aa, synthetic construct
SFKVDSR

SEQ ID NO: 195782 - protein, 7 aa, synthetic construct
KERVDTR

SEQ ID NO: 195783 - protein, 7 aa, synthetic construct
QGRQDSR

SEQ ID NO: 195784 - protein, 7 aa, synthetic construct
TGRLDRG

SEQ ID NO: 195785 - protein, 7 aa, synthetic construct
TGNRDSK

SEQ ID NO: 195786 - protein, 7 aa, synthetic construct
AGKTDSR

SEQ ID NO: 195787 - protein, 7 aa, synthetic construct
TGRTDKL

SEQ ID NO: 195788 - protein, 7 aa, synthetic construct
TMRQDSK

SEQ ID NO: 195789 - protein, 7 aa, synthetic construct
TGRKESM

SEQ ID NO: 195790 - protein, 7 aa, synthetic construct
TGRQENR

SEQ ID NO: 195791 - protein, 7 aa, synthetic construct
TGKVISF

SEQ ID NO: 195792 - protein, 7 aa, synthetic construct
TDRLGSR

SEQ ID NO: 195793 - protein, 7 aa, synthetic construct
TGRVHPQ

SEQ ID NO: 195794 - protein, 7 aa, synthetic construct
VGRVVSS

SEQ ID NO: 195795 - protein, 7 aa, synthetic construct
MGRLDNR

SEQ ID NO: 195796 - protein, 7 aa, synthetic construct
TNRVVDR

SEQ ID NO: 195797 - protein, 7 aa, synthetic construct
KGRDDFR

SEQ ID NO: 195798 - protein, 7 aa, synthetic construct
QGRADLR

SEQ ID NO: 195799 - protein, 7 aa, synthetic construct
TGKNDIR

SEQ ID NO: 195800 - protein, 7 aa, synthetic construct
MKHVDSR

SEQ ID NO: 195801 - protein, 7 aa, synthetic construct
TPSVHSR

SEQ ID NO: 195802 - protein, 7 aa, synthetic construct
MDRVQSR

SEQ ID NO: 195803 - protein, 7 aa, synthetic construct
TPHVTSR

SEQ ID NO: 195804 - protein, 7 aa, synthetic construct
DKRVDPR

SEQ ID NO: 195805 - protein, 7 aa, synthetic construct
TDRVTMR

SEQ ID NO: 195806 - protein, 7 aa, synthetic construct
TMRVQER

SEQ ID NO: 195807 - protein, 7 aa, synthetic construct
LDRVNSR

SEQ ID NO: 195808 - protein, 7 aa, synthetic construct
TGGMDKR

SEQ ID NO: 195809 - protein, 7 aa, synthetic construct
TSEVRSR

SEQ ID NO: 195810 - protein, 7 aa, synthetic construct
TGRQTSN

SEQ ID NO: 195811 - protein, 7 aa, synthetic construct
VGRQDQR

SEQ ID NO: 195812 - protein, 7 aa, synthetic construct
TKANDSR

SEQ ID NO: 195813 - protein, 7 aa, synthetic construct
AVRNDSR

SEQ ID NO: 195814 - protein, 7 aa, synthetic construct
TGSVSHR

SEQ ID NO: 195815 - protein, 7 aa, synthetic construct
TGRVKDQ

SEQ ID NO: 195816 - protein, 7 aa, synthetic construct
TSRADAR

SEQ ID NO: 195817 - protein, 7 aa, synthetic construct
KGRVDQI

SEQ ID NO: 195818 - protein, 7 aa, synthetic construct
TGRPEAR

SEQ ID NO: 195819 - protein, 7 aa, synthetic construct
MNRVDSK

SEQ ID NO: 195820 - protein, 7 aa, synthetic construct
IARVDNR

SEQ ID NO: 195821 - protein, 7 aa, synthetic construct
TSRVGDR

SEQ ID NO: 195822 - protein, 7 aa, synthetic construct
NKSVDSR

SEQ ID NO: 195823 - protein, 7 aa, synthetic construct
KGRSDSP

SEQ ID NO: 195824 - protein, 7 aa, synthetic construct
TGRALER

SEQ ID NO: 195825 - protein, 7 aa, synthetic construct
QKRVDSA

SEQ ID NO: 195826 - protein, 7 aa, synthetic construct
TGRVHNT

SEQ ID NO: 195827 - protein, 7 aa, synthetic construct
TGPVHTR

SEQ ID NO: 195828 - protein, 7 aa, synthetic construct
TNRVDSR

SEQ ID NO: 195829 - protein, 7 aa, synthetic construct
TGRKDNV

SEQ ID NO: 195830 - protein, 7 aa, synthetic construct
TKYNDSR

SEQ ID NO: 195831 - protein, 7 aa, synthetic construct
VGRMDGR

SEQ ID NO: 195832 - protein, 7 aa, synthetic construct
VGRTDLR

SEQ ID NO: 195833 - protein, 7 aa, synthetic construct
TRNPDSR

SEQ ID NO: 195834 - protein, 7 aa, synthetic construct
IGRNDMR

SEQ ID NO: 195835 - protein, 7 aa, synthetic construct
TIDVRSR

SEQ ID NO: 195836 - protein, 7 aa, synthetic construct
TDRVPIR

SEQ ID NO: 195837 - protein, 7 aa, synthetic construct
VGRVDKF

SEQ ID NO: 195838 - protein, 7 aa, synthetic construct
LGRVLSS

SEQ ID NO: 195839 - protein, 7 aa, synthetic construct
TTRSDQR

SEQ ID NO: 195840 - protein, 7 aa, synthetic construct
TAPVDRR

SEQ ID NO: 195841 - protein, 7 aa, synthetic construct
TGRVHTI

SEQ ID NO: 195842 - protein, 7 aa, synthetic construct
AGRVQER

SEQ ID NO: 195843 - protein, 7 aa, synthetic construct
TTRVEAR

SEQ ID NO: 195844 - protein, 7 aa, synthetic construct
TDRNPSR

SEQ ID NO: 195845 - protein, 7 aa, synthetic construct
KGSADSR

SEQ ID NO: 195846 - protein, 7 aa, synthetic construct
TPDVRSR

SEQ ID NO: 195847 - protein, 7 aa, synthetic construct
GVRGDSR

SEQ ID NO: 195848 - protein, 7 aa, synthetic construct
SGRVDPR

SEQ ID NO: 195849 - protein, 7 aa, synthetic construct
TRDVGSR

SEQ ID NO: 195850 - protein, 7 aa, synthetic construct
TDRVVSR

SEQ ID NO: 195851 - protein, 7 aa, synthetic construct
KGRVDIN

SEQ ID NO: 195852 - protein, 7 aa, synthetic construct
TTRNDVR

SEQ ID NO: 195853 - protein, 7 aa, synthetic construct
TGRIKSE

SEQ ID NO: 195854 - protein, 7 aa, synthetic construct
KSGVDSR

SEQ ID NO: 195855 - protein, 7 aa, synthetic construct
GGKVDMR

SEQ ID NO: 195856 - protein, 7 aa, synthetic construct
KARVDDR

SEQ ID NO: 195857 - protein, 7 aa, synthetic construct
LGRVDNK

SEQ ID NO: 195858 - protein, 7 aa, synthetic construct
TSRVEPR

SEQ ID NO: 195859 - protein, 7 aa, synthetic construct
FKTVDSR

SEQ ID NO: 195860 - protein, 7 aa, synthetic construct
TGRVAHA

SEQ ID NO: 195861 - protein, 7 aa, synthetic construct
TGHGASR

SEQ ID NO: 195862 - protein, 7 aa, synthetic construct
TNRVDKQ

SEQ ID NO: 195863 - protein, 7 aa, synthetic construct
GRSVDSR

SEQ ID NO: 195864 - protein, 7 aa, synthetic construct
TGRVHIS

SEQ ID NO: 195865 - protein, 7 aa, synthetic construct
TSHVASR

SEQ ID NO: 195866 - protein, 7 aa, synthetic construct
TFAKDSR

SEQ ID NO: 195867 - protein, 7 aa, synthetic construct
TGRIETR

SEQ ID NO: 195868 - protein, 7 aa, synthetic construct
VKRVDST

SEQ ID NO: 195869 - protein, 7 aa, synthetic construct
TGRVKET

SEQ ID NO: 195870 - protein, 7 aa, synthetic construct
IGRVSDR

SEQ ID NO: 195871 - protein, 7 aa, synthetic construct
TDRSPSR

SEQ ID NO: 195872 - protein, 7 aa, synthetic construct
MGRVTSV

SEQ ID NO: 195873 - protein, 7 aa, synthetic construct
MARTDSR

SEQ ID NO: 195874 - protein, 7 aa, synthetic construct
LNRADSR

SEQ ID NO: 195875 - protein, 7 aa, synthetic construct
TTRVHSN

SEQ ID NO: 195876 - protein, 7 aa, synthetic construct
TGHATSR

SEQ ID NO: 195877 - protein, 7 aa, synthetic construct
TENVKSR

SEQ ID NO: 195878 - protein, 7 aa, synthetic construct
TGRVSAH

SEQ ID NO: 195879 - protein, 7 aa, synthetic construct
NVRVDSR

SEQ ID NO: 195880 - protein, 7 aa, synthetic construct
LTRVDSR

SEQ ID NO: 195881 - protein, 7 aa, synthetic construct
DGSVKSR

SEQ ID NO: 195882 - protein, 7 aa, synthetic construct
MGRGDAR

SEQ ID NO: 195883 - protein, 7 aa, synthetic construct
TGDVRSK

SEQ ID NO: 195884 - protein, 7 aa, synthetic construct
TSRVDNR

SEQ ID NO: 195885 - protein, 7 aa, synthetic construct
TGYVKSV

SEQ ID NO: 195886 - protein, 7 aa, synthetic construct
TGRHISS

SEQ ID NO: 195887 - protein, 7 aa, synthetic construct
TQRSESR

SEQ ID NO: 195888 - protein, 7 aa, synthetic construct
TGHASSR

SEQ ID NO: 195889 - protein, 7 aa, synthetic construct
AKGVDSR

SEQ ID NO: 195890 - protein, 7 aa, synthetic construct
TKREDNR

SEQ ID NO: 195891 - protein, 7 aa, synthetic construct
ARGVDSR

SEQ ID NO: 195892 - protein, 7 aa, synthetic construct
TGYKESR

SEQ ID NO: 195893 - protein, 7 aa, synthetic construct
TSRTDTR

SEQ ID NO: 195894 - protein, 7 aa, synthetic construct
TQNKDSR

SEQ ID NO: 195895 - protein, 7 aa, synthetic construct
HGRVISA

SEQ ID NO: 195896 - protein, 7 aa, synthetic construct
TGRKDMV

SEQ ID NO: 195897 - protein, 7 aa, synthetic construct
QGRVMER

SEQ ID NO: 195898 - protein, 7 aa, synthetic construct
TGDVRMR

SEQ ID NO: 195899 - protein, 7 aa, synthetic construct
IGRVASA

SEQ ID NO: 195900 - protein, 7 aa, synthetic construct
TARTDVR

SEQ ID NO: 195901 - protein, 7 aa, synthetic construct
TRNVDVR

SEQ ID NO: 195902 - protein, 7 aa, synthetic construct
TRGVDNR

SEQ ID NO: 195903 - protein, 7 aa, synthetic construct
TNKYDSR

SEQ ID NO: 195904 - protein, 7 aa, synthetic construct
TSRVKSE

SEQ ID NO: 195905 - protein, 7 aa, synthetic construct
TDRPSSR

SEQ ID NO: 195906 - protein, 7 aa, synthetic construct
TGRADKG

SEQ ID NO: 195907 - protein, 7 aa, synthetic construct
TARVDRQ

SEQ ID NO: 195908 - protein, 7 aa, synthetic construct
TFKADSR

SEQ ID NO: 195909 - protein, 7 aa, synthetic construct
TGTVDRK

SEQ ID NO: 195910 - protein, 7 aa, synthetic construct
TGHKDLR

SEQ ID NO: 195911 - protein, 7 aa, synthetic construct
TNRVDKI

SEQ ID NO: 195912 - protein, 7 aa, synthetic construct
QGRVNSS

SEQ ID NO: 195913 - protein, 7 aa, synthetic construct
MTRADSR

SEQ ID NO: 195914 - protein, 7 aa, synthetic construct
IGRVDRN

SEQ ID NO: 195915 - protein, 7 aa, synthetic construct
SGKVDAR

SEQ ID NO: 195916 - protein, 7 aa, synthetic construct
YGRVVSG

SEQ ID NO: 195917 - protein, 7 aa, synthetic construct
TRSVDPR

SEQ ID NO: 195918 - protein, 7 aa, synthetic construct
QVRGDSR

SEQ ID NO: 195919 - protein, 7 aa, synthetic construct
VGRVMSH

SEQ ID NO: 195920 - protein, 7 aa, synthetic construct
FGKVDAR

SEQ ID NO: 195921 - protein, 7 aa, synthetic construct
IGRVDAK

SEQ ID NO: 195922 - protein, 7 aa, synthetic construct
TGGRESR

SEQ ID NO: 195923 - protein, 7 aa, synthetic construct
TIRESSR

SEQ ID NO: 195924 - protein, 7 aa, synthetic construct
TDRVLAR

SEQ ID NO: 195925 - protein, 7 aa, synthetic construct
IGRKDSI

SEQ ID NO: 195926 - protein, 7 aa, synthetic construct
IGRVDTR

SEQ ID NO: 195927 - protein, 7 aa, synthetic construct
TGKNDAR

SEQ ID NO: 195928 - protein, 7 aa, synthetic construct
TKRVDNI

SEQ ID NO: 195929 - protein, 7 aa, synthetic construct
RGAVDSK

SEQ ID NO: 195930 - protein, 7 aa, synthetic construct
TPRVMDR

SEQ ID NO: 195931 - protein, 7 aa, synthetic construct
MGRGDIR

SEQ ID NO: 195932 - protein, 7 aa, synthetic construct
TKRVMSD

SEQ ID NO: 195933 - protein, 7 aa, synthetic construct
YGRVQSG

SEQ ID NO: 195934 - protein, 7 aa, synthetic construct
TARVQER

SEQ ID NO: 195935 - protein, 7 aa, synthetic construct
TARVSER

SEQ ID NO: 195936 - protein, 7 aa, synthetic construct
TGRNQSA

SEQ ID NO: 195937 - protein, 7 aa, synthetic construct
TGRIESK

SEQ ID NO: 195938 - protein, 7 aa, synthetic construct
LGRQDNR

SEQ ID NO: 195939 - protein, 7 aa, synthetic construct
YGKVDMR

SEQ ID NO: 195940 - protein, 7 aa, synthetic construct
TGRELAR

SEQ ID NO: 195941 - protein, 7 aa, synthetic construct
IGRVVSN

SEQ ID NO: 195942 - protein, 7 aa, synthetic construct
FGRQDSK

SEQ ID NO: 195943 - protein, 7 aa, synthetic construct
VARVDMR

SEQ ID NO: 195944 - protein, 7 aa, synthetic construct
RVSVDSR

SEQ ID NO: 195945 - protein, 7 aa, synthetic construct
YGRNDSK

SEQ ID NO: 195946 - protein, 7 aa, synthetic construct
TERNISR

SEQ ID NO: 195947 - protein, 7 aa, synthetic construct
TTRVDRS

SEQ ID NO: 195948 - protein, 7 aa, synthetic construct
AKRVDSF

SEQ ID NO: 195949 - protein, 7 aa, synthetic construct
TGRVEKN

SEQ ID NO: 195950 - protein, 7 aa, synthetic construct
KGRVDGG

SEQ ID NO: 195951 - protein, 7 aa, synthetic construct
TGYKDSK

SEQ ID NO: 195952 - protein, 7 aa, synthetic construct
TGRTDRL

SEQ ID NO: 195953 - protein, 7 aa, synthetic construct
MGKADSR

SEQ ID NO: 195954 - protein, 7 aa, synthetic construct
TERVKER

SEQ ID NO: 195955 - protein, 7 aa, synthetic construct
TVKYDSR

SEQ ID NO: 195956 - protein, 7 aa, synthetic construct
TSGKDSR

SEQ ID NO: 195957 - protein, 7 aa, synthetic construct
QGRVMDR

SEQ ID NO: 195958 - protein, 7 aa, synthetic construct
IGRDASR

SEQ ID NO: 195959 - protein, 7 aa, synthetic construct
MGRVDAR

SEQ ID NO: 195960 - protein, 7 aa, synthetic construct
DTRVASR

SEQ ID NO: 195961 - protein, 7 aa, synthetic construct
TGRVAHS

SEQ ID NO: 195962 - protein, 7 aa, synthetic construct
LNRVDVR

SEQ ID NO: 195963 - protein, 7 aa, synthetic construct
TRNVDNR

SEQ ID NO: 195964 - protein, 7 aa, synthetic construct
LGREDKR

SEQ ID NO: 195965 - protein, 7 aa, synthetic construct
TRQVDIR

SEQ ID NO: 195966 - protein, 7 aa, synthetic construct
TGRGASQ

SEQ ID NO: 195967 - protein, 7 aa, synthetic construct
IKRVDSV

SEQ ID NO: 195968 - protein, 7 aa, synthetic construct
TERVAGR

SEQ ID NO: 195969 - protein, 7 aa, synthetic construct
RVAVDSR

SEQ ID NO: 195970 - protein, 7 aa, synthetic construct
LGRVSSQ

SEQ ID NO: 195971 - protein, 7 aa, synthetic construct
VTRVDSK

SEQ ID NO: 195972 - protein, 7 aa, synthetic construct
IGRVSER

SEQ ID NO: 195973 - protein, 7 aa, synthetic construct
KMRVDSG

SEQ ID NO: 195974 - protein, 7 aa, synthetic construct
TIRKDST

SEQ ID NO: 195975 - protein, 7 aa, synthetic construct
TGRADPR

SEQ ID NO: 195976 - protein, 7 aa, synthetic construct
TKRVDFA

SEQ ID NO: 195977 - protein, 7 aa, synthetic construct
TGRTMDR

SEQ ID NO: 195978 - protein, 7 aa, synthetic construct
TGRVSSS

SEQ ID NO: 195979 - protein, 7 aa, synthetic construct
TGKVDYR

SEQ ID NO: 195980 - protein, 7 aa, synthetic construct
AGRVHSV

SEQ ID NO: 195981 - protein, 7 aa, synthetic construct
TDRQQSR

SEQ ID NO: 195982 - protein, 7 aa, synthetic construct
FGRVSSN

SEQ ID NO: 195983 - protein, 7 aa, synthetic construct
TDRVTIR

SEQ ID NO: 195984 - protein, 7 aa, synthetic construct
TGRNPSN

SEQ ID NO: 195985 - protein, 7 aa, synthetic construct
QGRTDIR

SEQ ID NO: 195986 - protein, 7 aa, synthetic construct
VGRLDTR

SEQ ID NO: 195987 - protein, 7 aa, synthetic construct
TGRVVHS

SEQ ID NO: 195988 - protein, 7 aa, synthetic construct
TARVVER

SEQ ID NO: 195989 - protein, 7 aa, synthetic construct
TSRETSR

SEQ ID NO: 195990 - protein, 7 aa, synthetic construct
TGRESPR

SEQ ID NO: 195991 - protein, 7 aa, synthetic construct
VRGVDSR

SEQ ID NO: 195992 - protein, 7 aa, synthetic construct
LGRTDNR

SEQ ID NO: 195993 - protein, 7 aa, synthetic construct
VKHVDSR

SEQ ID NO: 195994 - protein, 7 aa, synthetic construct
QGRVQSS

SEQ ID NO: 195995 - protein, 7 aa, synthetic construct
TGKYDVR

SEQ ID NO: 195996 - protein, 7 aa, synthetic construct
DGRVGPR

SEQ ID NO: 195997 - protein, 7 aa, synthetic construct
QSRVDGR

SEQ ID NO: 195998 - protein, 7 aa, synthetic construct
KDRMDSR

SEQ ID NO: 195999 - protein, 7 aa, synthetic construct
FSKVDSR

SEQ ID NO: 196000 - protein, 7 aa, synthetic construct
TSAVDRR

SEQ ID NO: 196001 - protein, 7 aa, synthetic construct
VGRVSSV

SEQ ID NO: 196002 - protein, 7 aa, synthetic construct
VDRVTSR

SEQ ID NO: 196003 - protein, 7 aa, synthetic construct
TGRKDVI

SEQ ID NO: 196004 - protein, 7 aa, synthetic construct
VGRSDVR

SEQ ID NO: 196005 - protein, 7 aa, synthetic construct
TGRMDKA

SEQ ID NO: 196006 - protein, 7 aa, synthetic construct
TARKDST

SEQ ID NO: 196007 - protein, 7 aa, synthetic construct
LGRVPDR

SEQ ID NO: 196008 - protein, 7 aa, synthetic construct
VARVDAR

SEQ ID NO: 196009 - protein, 7 aa, synthetic construct
GGRVDKQ

SEQ ID NO: 196010 - protein, 7 aa, synthetic construct
TGRVEAR

SEQ ID NO: 196011 - protein, 7 aa, synthetic construct
NERVTSR

SEQ ID NO: 196012 - protein, 7 aa, synthetic construct
QGRVSSS

SEQ ID NO: 196013 - protein, 7 aa, synthetic construct
TKQHDSR

SEQ ID NO: 196014 - protein, 7 aa, synthetic construct
RGKVDST

SEQ ID NO: 196015 - protein, 7 aa, synthetic construct
TSRADNR

SEQ ID NO: 196016 - protein, 7 aa, synthetic construct
TDRVAPR

SEQ ID NO: 196017 - protein, 7 aa, synthetic construct
TGRTDRP

SEQ ID NO: 196018 - protein, 7 aa, synthetic construct
TGRSSSV

SEQ ID NO: 196019 - protein, 7 aa, synthetic construct
TGRPISN

SEQ ID NO: 196020 - protein, 7 aa, synthetic construct
KGRVDPA

SEQ ID NO: 196021 - protein, 7 aa, synthetic construct
QGRVDKM

SEQ ID NO: 196022 - protein, 7 aa, synthetic construct
TGRMTER

SEQ ID NO: 196023 - protein, 7 aa, synthetic construct
TDRVTQR

SEQ ID NO: 196024 - protein, 7 aa, synthetic construct
TGRPIDR

SEQ ID NO: 196025 - protein, 7 aa, synthetic construct
TGRNDMK

SEQ ID NO: 196026 - protein, 7 aa, synthetic construct
LSRQDSR

SEQ ID NO: 196027 - protein, 7 aa, synthetic construct
TSRVDAK

SEQ ID NO: 196028 - protein, 7 aa, synthetic construct
TGRKDFA

SEQ ID NO: 196029 - protein, 7 aa, synthetic construct
TERSPSR

SEQ ID NO: 196030 - protein, 7 aa, synthetic construct
TIRNDLR

SEQ ID NO: 196031 - protein, 7 aa, synthetic construct
TEMVKSR

SEQ ID NO: 196032 - protein, 7 aa, synthetic construct
LGRETSR

SEQ ID NO: 196033 - protein, 7 aa, synthetic construct
TLRDDKR

SEQ ID NO: 196034 - protein, 7 aa, synthetic construct
LGRVDKI

SEQ ID NO: 196035 - protein, 7 aa, synthetic construct
VGKQDSR

SEQ ID NO: 196036 - protein, 7 aa, synthetic construct
TTRMESR

SEQ ID NO: 196037 - protein, 7 aa, synthetic construct
TFRSESR

SEQ ID NO: 196038 - protein, 7 aa, synthetic construct
IGKTDSR

SEQ ID NO: 196039 - protein, 7 aa, synthetic construct
MGRNDAR

SEQ ID NO: 196040 - protein, 7 aa, synthetic construct
SKSVDSR

SEQ ID NO: 196041 - protein, 7 aa, synthetic construct
TTRVDRA

SEQ ID NO: 196042 - protein, 7 aa, synthetic construct
LGRKDSG

SEQ ID NO: 196043 - protein, 7 aa, synthetic construct
ITRTDSR

SEQ ID NO: 196044 - protein, 7 aa, synthetic construct
TTKVDHR

SEQ ID NO: 196045 - protein, 7 aa, synthetic construct
MGRNDSR

SEQ ID NO: 196046 - protein, 7 aa, synthetic construct
GQRVESR

SEQ ID NO: 196047 - protein, 7 aa, synthetic construct
SRAVDSR

SEQ ID NO: 196048 - protein, 7 aa, synthetic construct
TGREQSR

SEQ ID NO: 196049 - protein, 7 aa, synthetic construct
TDRKDLR

SEQ ID NO: 196050 - protein, 7 aa, synthetic construct
KGREDGR

SEQ ID NO: 196051 - protein, 7 aa, synthetic construct
TGRNDSK

SEQ ID NO: 196052 - protein, 7 aa, synthetic construct
VGRNESR

SEQ ID NO: 196053 - protein, 7 aa, synthetic construct
TSRVHSA

SEQ ID NO: 196054 - protein, 7 aa, synthetic construct
TGKGDTR

SEQ ID NO: 196055 - protein, 7 aa, synthetic construct
TQRVSER

SEQ ID NO: 196056 - protein, 7 aa, synthetic construct
IGRVVSA

SEQ ID NO: 196057 - protein, 7 aa, synthetic construct
TGRADTR

SEQ ID NO: 196058 - protein, 7 aa, synthetic construct
MGRVGER

SEQ ID NO: 196059 - protein, 7 aa, synthetic construct
FGRVMSA

SEQ ID NO: 196060 - protein, 7 aa, synthetic construct
VGRIDAR

SEQ ID NO: 196061 - protein, 7 aa, synthetic construct
TVRSESR

SEQ ID NO: 196062 - protein, 7 aa, synthetic construct
TERNASR

SEQ ID NO: 196063 - protein, 7 aa, synthetic construct
TRSVESR

SEQ ID NO: 196064 - protein, 7 aa, synthetic construct
IGRADSR

SEQ ID NO: 196065 - protein, 7 aa, synthetic construct
TEQVKSR

SEQ ID NO: 196066 - protein, 7 aa, synthetic construct
TGRPVER

SEQ ID NO: 196067 - protein, 7 aa, synthetic construct
VARVDSR

SEQ ID NO: 196068 - protein, 7 aa, synthetic construct
TGRATSV

SEQ ID NO: 196069 - protein, 7 aa, synthetic construct
LGRGDIR

SEQ ID NO: 196070 - protein, 7 aa, synthetic construct
THRVTSV

SEQ ID NO: 196071 - protein, 7 aa, synthetic construct
AGRVTER

SEQ ID NO: 196072 - protein, 7 aa, synthetic construct
TGNPDRR

SEQ ID NO: 196073 - protein, 7 aa, synthetic construct
GGRTDGR

SEQ ID NO: 196074 - protein, 7 aa, synthetic construct
TGRADNR

SEQ ID NO: 196075 - protein, 7 aa, synthetic construct
VTRSDSR

SEQ ID NO: 196076 - protein, 7 aa, synthetic construct
TARVHSS

SEQ ID NO: 196077 - protein, 7 aa, synthetic construct
TGHVGSR

SEQ ID NO: 196078 - protein, 7 aa, synthetic construct
TARDDKR

SEQ ID NO: 196079 - protein, 7 aa, synthetic construct
AGRVDPR

SEQ ID NO: 196080 - protein, 7 aa, synthetic construct
HGRVVSG

SEQ ID NO: 196081 - protein, 7 aa, synthetic construct
IGRPDSK

SEQ ID NO: 196082 - protein, 7 aa, synthetic construct
TGFVKER

SEQ ID NO: 196083 - protein, 7 aa, synthetic construct
TKQQDSR

SEQ ID NO: 196084 - protein, 7 aa, synthetic construct
TGRIHSS

SEQ ID NO: 196085 - protein, 7 aa, synthetic construct
TQSKDSR

SEQ ID NO: 196086 - protein, 7 aa, synthetic construct
KGIVESR

SEQ ID NO: 196087 - protein, 7 aa, synthetic construct
TGRVKEQ

SEQ ID NO: 196088 - protein, 7 aa, synthetic construct
VGRKDSV

SEQ ID NO: 196089 - protein, 7 aa, synthetic construct
TVRIESR

SEQ ID NO: 196090 - protein, 7 aa, synthetic construct
TMRVDKQ

SEQ ID NO: 196091 - protein, 7 aa, synthetic construct
KGHVDGR

SEQ ID NO: 196092 - protein, 7 aa, synthetic construct
KARVDSF

SEQ ID NO: 196093 - protein, 7 aa, synthetic construct
TGRNNSN

SEQ ID NO: 196094 - protein, 7 aa, synthetic construct
TKRVDYG

SEQ ID NO: 196095 - protein, 7 aa, synthetic construct
THGVNSR

SEQ ID NO: 196096 - protein, 7 aa, synthetic construct
TGRVVDK

SEQ ID NO: 196097 - protein, 7 aa, synthetic construct
TGKMDSR

SEQ ID NO: 196098 - protein, 7 aa, synthetic construct
VGRNDNR

SEQ ID NO: 196099 - protein, 7 aa, synthetic construct
ASRGDSR

SEQ ID NO: 196100 - protein, 7 aa, synthetic construct
MGRVTDR

SEQ ID NO: 196101 - protein, 7 aa, synthetic construct
AGRVHSA

SEQ ID NO: 196102 - protein, 7 aa, synthetic construct
LGRVISH

SEQ ID NO: 196103 - protein, 7 aa, synthetic construct
LGRNDQR

SEQ ID NO: 196104 - protein, 7 aa, synthetic construct
TERAPSR

SEQ ID NO: 196105 - protein, 7 aa, synthetic construct
VGRLDSK

SEQ ID NO: 196106 - protein, 7 aa, synthetic construct
TGRVDPR

SEQ ID NO: 196107 - protein, 7 aa, synthetic construct
TGRVQRE

SEQ ID NO: 196108 - protein, 7 aa, synthetic construct
TKEVDRR

SEQ ID NO: 196109 - protein, 7 aa, synthetic construct
THKVDSR

SEQ ID NO: 196110 - protein, 7 aa, synthetic construct
DGRVAGR

SEQ ID NO: 196111 - protein, 7 aa, synthetic construct
TGGHVSR

SEQ ID NO: 196112 - protein, 7 aa, synthetic construct
TRQQDSR

SEQ ID NO: 196113 - protein, 7 aa, synthetic construct
TGSKDYR

SEQ ID NO: 196114 - protein, 7 aa, synthetic construct
QGRKDSA

SEQ ID NO: 196115 - protein, 7 aa, synthetic construct
TGRDRSN

SEQ ID NO: 196116 - protein, 7 aa, synthetic construct
FARTDSR

SEQ ID NO: 196117 - protein, 7 aa, synthetic construct
TGKADMR

SEQ ID NO: 196118 - protein, 7 aa, synthetic construct
LGRVMSN

SEQ ID NO: 196119 - protein, 7 aa, synthetic construct
HGKVDVR

SEQ ID NO: 196120 - protein, 7 aa, synthetic construct
QARVDAR

SEQ ID NO: 196121 - protein, 7 aa, synthetic construct
TDRVITR

SEQ ID NO: 196122 - protein, 7 aa, synthetic construct
AGRVDKV

SEQ ID NO: 196123 - protein, 7 aa, synthetic construct
VLRGDSR

SEQ ID NO: 196124 - protein, 7 aa, synthetic construct
YGGKDSR

SEQ ID NO: 196125 - protein, 7 aa, synthetic construct
LKREDSR

SEQ ID NO: 196126 - protein, 7 aa, synthetic construct
KGTIDSR

SEQ ID NO: 196127 - protein, 7 aa, synthetic construct
KGRVDVF

SEQ ID NO: 196128 - protein, 7 aa, synthetic construct
REKVDSR

SEQ ID NO: 196129 - protein, 7 aa, synthetic construct
MSRQDSR

SEQ ID NO: 196130 - protein, 7 aa, synthetic construct
TGRQEGR

SEQ ID NO: 196131 - protein, 7 aa, synthetic construct
TKRVDSS

SEQ ID NO: 196132 - protein, 7 aa, synthetic construct
TTRNDNR

SEQ ID NO: 196133 - protein, 7 aa, synthetic construct
TERAASR

SEQ ID NO: 196134 - protein, 7 aa, synthetic construct
TYKVDAR

SEQ ID NO: 196135 - protein, 7 aa, synthetic construct
HGKVDTR

SEQ ID NO: 196136 - protein, 7 aa, synthetic construct
TERVPVR

SEQ ID NO: 196137 - protein, 7 aa, synthetic construct
TGRSDGK

SEQ ID NO: 196138 - protein, 7 aa, synthetic construct
QGRADSR

SEQ ID NO: 196139 - protein, 7 aa, synthetic construct
TGRVEKS

SEQ ID NO: 196140 - protein, 7 aa, synthetic construct
VQRGDSR

SEQ ID NO: 196141 - protein, 7 aa, synthetic construct
TGRIEAR

SEQ ID NO: 196142 - protein, 7 aa, synthetic construct
TVRVQDR

SEQ ID NO: 196143 - protein, 7 aa, synthetic construct
TGRVDGR

SEQ ID NO: 196144 - protein, 7 aa, synthetic construct
TSRVDKQ

SEQ ID NO: 196145 - protein, 7 aa, synthetic construct
TSRADIR

SEQ ID NO: 196146 - protein, 7 aa, synthetic construct
GRQVDSR

SEQ ID NO: 196147 - protein, 7 aa, synthetic construct
AGEVKSR

SEQ ID NO: 196148 - protein, 7 aa, synthetic construct
IGRVDPR

SEQ ID NO: 196149 - protein, 7 aa, synthetic construct
TGRSDAR

SEQ ID NO: 196150 - protein, 7 aa, synthetic construct
TGHKDVR

SEQ ID NO: 196151 - protein, 7 aa, synthetic construct
IGRVQSL

SEQ ID NO: 196152 - protein, 7 aa, synthetic construct
TGRADKQ

SEQ ID NO: 196153 - protein, 7 aa, synthetic construct
TGEVKQR

SEQ ID NO: 196154 - protein, 7 aa, synthetic construct
TRVTDSR

SEQ ID NO: 196155 - protein, 7 aa, synthetic construct
RQRVDSV

SEQ ID NO: 196156 - protein, 7 aa, synthetic construct
KGMVDPR

SEQ ID NO: 196157 - protein, 7 aa, synthetic construct
QGKVDNR

SEQ ID NO: 196158 - protein, 7 aa, synthetic construct
TIRKDSS

SEQ ID NO: 196159 - protein, 7 aa, synthetic construct
TGRNVDR

SEQ ID NO: 196160 - protein, 7 aa, synthetic construct
TGDVVKR

SEQ ID NO: 196161 - protein, 7 aa, synthetic construct
TDRVTSR

SEQ ID NO: 196162 - protein, 7 aa, synthetic construct
TSSKDSR

SEQ ID NO: 196163 - protein, 7 aa, synthetic construct
TGRKDGI

SEQ ID NO: 196164 - protein, 7 aa, synthetic construct
TDRVSTR

SEQ ID NO: 196165 - protein, 7 aa, synthetic construct
DKRVDVR

SEQ ID NO: 196166 - protein, 7 aa, synthetic construct
THKVDTR

SEQ ID NO: 196167 - protein, 7 aa, synthetic construct
TGDLRSR

SEQ ID NO: 196168 - protein, 7 aa, synthetic construct
GGKMDSR

SEQ ID NO: 196169 - protein, 7 aa, synthetic construct
TGRQDVR

SEQ ID NO: 196170 - protein, 7 aa, synthetic construct
VQRVDSK

SEQ ID NO: 196171 - protein, 7 aa, synthetic construct
TERLASR

SEQ ID NO: 196172 - protein, 7 aa, synthetic construct
TGRSSSN

SEQ ID NO: 196173 - protein, 7 aa, synthetic construct
THRVISG

SEQ ID NO: 196174 - protein, 7 aa, synthetic construct
DKRVDNR

SEQ ID NO: 196175 - protein, 7 aa, synthetic construct
TGRSEAR

SEQ ID NO: 196176 - protein, 7 aa, synthetic construct
GQKVDSR

SEQ ID NO: 196177 - protein, 7 aa, synthetic construct
TGRKDLM

SEQ ID NO: 196178 - protein, 7 aa, synthetic construct
TGRNISQ

SEQ ID NO: 196179 - protein, 7 aa, synthetic construct
TGSVDKR

SEQ ID NO: 196180 - protein, 7 aa, synthetic construct
HKVVDSR

SEQ ID NO: 196181 - protein, 7 aa, synthetic construct
QGRVDTK

SEQ ID NO: 196182 - protein, 7 aa, synthetic construct
SKRVDSV

SEQ ID NO: 196183 - protein, 7 aa, synthetic construct
TDRIISR

SEQ ID NO: 196184 - protein, 7 aa, synthetic construct
IPRGDSR

SEQ ID NO: 196185 - protein, 7 aa, synthetic construct
TSSRDSR

SEQ ID NO: 196186 - protein, 7 aa, synthetic construct
VGRVDKV

SEQ ID NO: 196187 - protein, 7 aa, synthetic construct
RGSQDSR

SEQ ID NO: 196188 - protein, 7 aa, synthetic construct
TGRQSDR

SEQ ID NO: 196189 - protein, 7 aa, synthetic construct
QARVDIR

SEQ ID NO: 196190 - protein, 7 aa, synthetic construct
VQRVDNR

SEQ ID NO: 196191 - protein, 7 aa, synthetic construct
IGRADNR

SEQ ID NO: 196192 - protein, 7 aa, synthetic construct
TVRVSSH

SEQ ID NO: 196193 - protein, 7 aa, synthetic construct
TGRPSSL

SEQ ID NO: 196194 - protein, 7 aa, synthetic construct
TQRVETR

SEQ ID NO: 196195 - protein, 7 aa, synthetic construct
TGHKDTR

SEQ ID NO: 196196 - protein, 7 aa, synthetic construct
YARADSR

SEQ ID NO: 196197 - protein, 7 aa, synthetic construct
KERIDSR

SEQ ID NO: 196198 - protein, 7 aa, synthetic construct
TVEVKSR

SEQ ID NO: 196199 - protein, 7 aa, synthetic construct
TERVNVR

SEQ ID NO: 196200 - protein, 7 aa, synthetic construct
MGRPDSK

SEQ ID NO: 196201 - protein, 7 aa, synthetic construct
TPRNESR

SEQ ID NO: 196202 - protein, 7 aa, synthetic construct
TSRVDRS

SEQ ID NO: 196203 - protein, 7 aa, synthetic construct
TTRVHSQ

SEQ ID NO: 196204 - protein, 7 aa, synthetic construct
KDRVDAR

SEQ ID NO: 196205 - protein, 7 aa, synthetic construct
TVRVEAR

SEQ ID NO: 196206 - protein, 7 aa, synthetic construct
TGRVEKV

SEQ ID NO: 196207 - protein, 7 aa, synthetic construct
TQRVDKF

SEQ ID NO: 196208 - protein, 7 aa, synthetic construct
TSRVDRI

SEQ ID NO: 196209 - protein, 7 aa, synthetic construct
HGKVDLR

SEQ ID NO: 196210 - protein, 7 aa, synthetic construct
TKHIDSR

SEQ ID NO: 196211 - protein, 7 aa, synthetic construct
TGRMSSA

SEQ ID NO: 196212 - protein, 7 aa, synthetic construct
TTRDDRR

SEQ ID NO: 196213 - protein, 7 aa, synthetic construct
TGREMSK

SEQ ID NO: 196214 - protein, 7 aa, synthetic construct
DGRVKSN

SEQ ID NO: 196215 - protein, 7 aa, synthetic construct
VGRVISH

SEQ ID NO: 196216 - protein, 7 aa, synthetic construct
TDRLNSR

SEQ ID NO: 196217 - protein, 7 aa, synthetic construct
TQRVVER

SEQ ID NO: 196218 - protein, 7 aa, synthetic construct
TERVALR

SEQ ID NO: 196219 - protein, 7 aa, synthetic construct
KERPDSR

SEQ ID NO: 196220 - protein, 7 aa, synthetic construct
YARSDSR

SEQ ID NO: 196221 - protein, 7 aa, synthetic construct
MGRVQSA

SEQ ID NO: 196222 - protein, 7 aa, synthetic construct
TEGVKSR

SEQ ID NO: 196223 - protein, 7 aa, synthetic construct
TSRNDSK

SEQ ID NO: 196224 - protein, 7 aa, synthetic construct
TMRKDSG

SEQ ID NO: 196225 - protein, 7 aa, synthetic construct
TTRVHSG

SEQ ID NO: 196226 - protein, 7 aa, synthetic construct
TSRQDSR

SEQ ID NO: 196227 - protein, 7 aa, synthetic construct
RGDVASR

SEQ ID NO: 196228 - protein, 7 aa, synthetic construct
TAKMDSR

SEQ ID NO: 196229 - protein, 7 aa, synthetic construct
TVRVKSD

SEQ ID NO: 196230 - protein, 7 aa, synthetic construct
MGKNDSR

SEQ ID NO: 196231 - protein, 7 aa, synthetic construct
TFRVDKS

SEQ ID NO: 196232 - protein, 7 aa, synthetic construct
QERVGSR

SEQ ID NO: 196233 - protein, 7 aa, synthetic construct
TEKVLSR

SEQ ID NO: 196234 - protein, 7 aa, synthetic construct
GGRVIER

SEQ ID NO: 196235 - protein, 7 aa, synthetic construct
TNRVDAR

SEQ ID NO: 196236 - protein, 7 aa, synthetic construct
TNKFDSR

SEQ ID NO: 196237 - protein, 7 aa, synthetic construct
TGRTTER

SEQ ID NO: 196238 - protein, 7 aa, synthetic construct
HAKVDSR

SEQ ID NO: 196239 - protein, 7 aa, synthetic construct
TVREDKR

SEQ ID NO: 196240 - protein, 7 aa, synthetic construct
KERNDSR

SEQ ID NO: 196241 - protein, 7 aa, synthetic construct
YVKVDSR

SEQ ID NO: 196242 - protein, 7 aa, synthetic construct
SGKVDSR

SEQ ID NO: 196243 - protein, 7 aa, synthetic construct
TARVSSN

SEQ ID NO: 196244 - protein, 7 aa, synthetic construct
TGRESNR

SEQ ID NO: 196245 - protein, 7 aa, synthetic construct
TKRVVSE

SEQ ID NO: 196246 - protein, 7 aa, synthetic construct
FKRVDSA

SEQ ID NO: 196247 - protein, 7 aa, synthetic construct
TKQNDSR

SEQ ID NO: 196248 - protein, 7 aa, synthetic construct
VGRSDSK

SEQ ID NO: 196249 - protein, 7 aa, synthetic construct
QTRQDSR

SEQ ID NO: 196250 - protein, 7 aa, synthetic construct
QGRVMSN

SEQ ID NO: 196251 - protein, 7 aa, synthetic construct
TERLGSR

SEQ ID NO: 196252 - protein, 7 aa, synthetic construct
TDRVDRK

SEQ ID NO: 196253 - protein, 7 aa, synthetic construct
TDRVVQR

SEQ ID NO: 196254 - protein, 7 aa, synthetic construct
TGRGDSK

SEQ ID NO: 196255 - protein, 7 aa, synthetic construct
TFRVTSS

SEQ ID NO: 196256 - protein, 7 aa, synthetic construct
TGRVHTG

SEQ ID NO: 196257 - protein, 7 aa, synthetic construct
TGRSLER

SEQ ID NO: 196258 - protein, 7 aa, synthetic construct
TGKVMDR

SEQ ID NO: 196259 - protein, 7 aa, synthetic construct
TMRNDLR

SEQ ID NO: 196260 - protein, 7 aa, synthetic construct
TLRVNDR

SEQ ID NO: 196261 - protein, 7 aa, synthetic construct
FGRVASN

SEQ ID NO: 196262 - protein, 7 aa, synthetic construct
TVSVDRR

SEQ ID NO: 196263 - protein, 7 aa, synthetic construct
TPHKDSR

SEQ ID NO: 196264 - protein, 7 aa, synthetic construct
VIRQDSR

SEQ ID NO: 196265 - protein, 7 aa, synthetic construct
DGRVPVR

SEQ ID NO: 196266 - protein, 7 aa, synthetic construct
KTGVDSR

SEQ ID NO: 196267 - protein, 7 aa, synthetic construct
TGKVHSF

SEQ ID NO: 196268 - protein, 7 aa, synthetic construct
TGRTDRN

SEQ ID NO: 196269 - protein, 7 aa, synthetic construct
KGRVDPF

SEQ ID NO: 196270 - protein, 7 aa, synthetic construct
TIREISR

SEQ ID NO: 196271 - protein, 7 aa, synthetic construct
VGRVQSA

SEQ ID NO: 196272 - protein, 7 aa, synthetic construct
FGRVISA

SEQ ID NO: 196273 - protein, 7 aa, synthetic construct
KGRVDQA

SEQ ID NO: 196274 - protein, 7 aa, synthetic construct
TGRQDKM

SEQ ID NO: 196275 - protein, 7 aa, synthetic construct
QGRVQSN

SEQ ID NO: 196276 - protein, 7 aa, synthetic construct
TGPVDRR

SEQ ID NO: 196277 - protein, 7 aa, synthetic construct
MGRVISN

SEQ ID NO: 196278 - protein, 7 aa, synthetic construct
LGRVISN

SEQ ID NO: 196279 - protein, 7 aa, synthetic construct
TGRVEKH

SEQ ID NO: 196280 - protein, 7 aa, synthetic construct
TGRNTSI

SEQ ID NO: 196281 - protein, 7 aa, synthetic construct
QGRVEQR

SEQ ID NO: 196282 - protein, 7 aa, synthetic construct
IGRTDLR

SEQ ID NO: 196283 - protein, 7 aa, synthetic construct
TDRNDKR

SEQ ID NO: 196284 - protein, 7 aa, synthetic construct
LGRVESK

SEQ ID NO: 196285 - protein, 7 aa, synthetic construct
TDRVQAR

SEQ ID NO: 196286 - protein, 7 aa, synthetic construct
TGRTSSN

SEQ ID NO: 196287 - protein, 7 aa, synthetic construct
TGHVTSR

SEQ ID NO: 196288 - protein, 7 aa, synthetic construct
KGSVDPR

SEQ ID NO: 196289 - protein, 7 aa, synthetic construct
VGGVGSR

SEQ ID NO: 196290 - protein, 7 aa, synthetic construct
TGRQDKT

SEQ ID NO: 196291 - protein, 7 aa, synthetic construct
KDRVDNR

SEQ ID NO: 196292 - protein, 7 aa, synthetic construct
IGTVDRR

SEQ ID NO: 196293 - protein, 7 aa, synthetic construct
TLRNESR

SEQ ID NO: 196294 - protein, 7 aa, synthetic construct
TARNDAR

SEQ ID NO: 196295 - protein, 7 aa, synthetic construct
RGRVDPP

SEQ ID NO: 196296 - protein, 7 aa, synthetic construct
TRTVDAR

SEQ ID NO: 196297 - protein, 7 aa, synthetic construct
TGRAADR

SEQ ID NO: 196298 - protein, 7 aa, synthetic construct
LGRDTSR

SEQ ID NO: 196299 - protein, 7 aa, synthetic construct
GGKSDSR

SEQ ID NO: 196300 - protein, 7 aa, synthetic construct
TGRVVDR

SEQ ID NO: 196301 - protein, 7 aa, synthetic construct
LARNDSR

SEQ ID NO: 196302 - protein, 7 aa, synthetic construct
TGRDKSM

SEQ ID NO: 196303 - protein, 7 aa, synthetic construct
LGRVQER

SEQ ID NO: 196304 - protein, 7 aa, synthetic construct
QRAVDSR

SEQ ID NO: 196305 - protein, 7 aa, synthetic construct
TNREISR

SEQ ID NO: 196306 - protein, 7 aa, synthetic construct
IGRVTST

SEQ ID NO: 196307 - protein, 7 aa, synthetic construct
KGREDSK

SEQ ID NO: 196308 - protein, 7 aa, synthetic construct
KMRVDSS

SEQ ID NO: 196309 - protein, 7 aa, synthetic construct
TGRVERG

SEQ ID NO: 196310 - protein, 7 aa, synthetic construct
TKNHDSR

SEQ ID NO: 196311 - protein, 7 aa, synthetic construct
ASRVDAR

SEQ ID NO: 196312 - protein, 7 aa, synthetic construct
KGHVDVR

SEQ ID NO: 196313 - protein, 7 aa, synthetic construct
TARVAER

SEQ ID NO: 196314 - protein, 7 aa, synthetic construct
TDRVANR

SEQ ID NO: 196315 - protein, 7 aa, synthetic construct
TGRHTSA

SEQ ID NO: 196316 - protein, 7 aa, synthetic construct
TGRGEGR

SEQ ID NO: 196317 - protein, 7 aa, synthetic construct
TGRVGHN

SEQ ID NO: 196318 - protein, 7 aa, synthetic construct
VVRQDSR

SEQ ID NO: 196319 - protein, 7 aa, synthetic construct
KGRVDMM

SEQ ID NO: 196320 - protein, 7 aa, synthetic construct
TGRVIER

SEQ ID NO: 196321 - protein, 7 aa, synthetic construct
TGRIEPR

SEQ ID NO: 196322 - protein, 7 aa, synthetic construct
VGRVISS

SEQ ID NO: 196323 - protein, 7 aa, synthetic construct
KERTDSR

SEQ ID NO: 196324 - protein, 7 aa, synthetic construct
TGRVNTN

SEQ ID NO: 196325 - protein, 7 aa, synthetic construct
TGRGQSI

SEQ ID NO: 196326 - protein, 7 aa, synthetic construct
TTREVSR

SEQ ID NO: 196327 - protein, 7 aa, synthetic construct
TGRVDKF

SEQ ID NO: 196328 - protein, 7 aa, synthetic construct
TGSHASR

SEQ ID NO: 196329 - protein, 7 aa, synthetic construct
QGRIESR

SEQ ID NO: 196330 - protein, 7 aa, synthetic construct
TDRVIQR

SEQ ID NO: 196331 - protein, 7 aa, synthetic construct
NKMVDSR

SEQ ID NO: 196332 - protein, 7 aa, synthetic construct
TGAVEKR

SEQ ID NO: 196333 - protein, 7 aa, synthetic construct
VGRVTSS

SEQ ID NO: 196334 - protein, 7 aa, synthetic construct
TVRGDSR

SEQ ID NO: 196335 - protein, 7 aa, synthetic construct
TKREDPR

SEQ ID NO: 196336 - protein, 7 aa, synthetic construct
IGRVDKS

SEQ ID NO: 196337 - protein, 7 aa, synthetic construct
TREVTSR

SEQ ID NO: 196338 - protein, 7 aa, synthetic construct
KGRVDVS

SEQ ID NO: 196339 - protein, 7 aa, synthetic construct
KGRDDMR

SEQ ID NO: 196340 - protein, 7 aa, synthetic construct
VGRADSK

SEQ ID NO: 196341 - protein, 7 aa, synthetic construct
KGIVDGR

SEQ ID NO: 196342 - protein, 7 aa, synthetic construct
TERAVSR

SEQ ID NO: 196343 - protein, 7 aa, synthetic construct
TGRPDKG

SEQ ID NO: 196344 - protein, 7 aa, synthetic construct
LGRADLR

SEQ ID NO: 196345 - protein, 7 aa, synthetic construct
TYNKDSR

SEQ ID NO: 196346 - protein, 7 aa, synthetic construct
VGRVASA

SEQ ID NO: 196347 - protein, 7 aa, synthetic construct
MFKVDSR

SEQ ID NO: 196348 - protein, 7 aa, synthetic construct
SGGVSSR

SEQ ID NO: 196349 - protein, 7 aa, synthetic construct
TLRKDSN

SEQ ID NO: 196350 - protein, 7 aa, synthetic construct
KGRVDLS

SEQ ID NO: 196351 - protein, 7 aa, synthetic construct
TGRVLHQ

SEQ ID NO: 196352 - protein, 7 aa, synthetic construct
TQNVDRR

SEQ ID NO: 196353 - protein, 7 aa, synthetic construct
VKRVDDR

SEQ ID NO: 196354 - protein, 7 aa, synthetic construct
KGRVDVT

SEQ ID NO: 196355 - protein, 7 aa, synthetic construct
TGRVNEK

SEQ ID NO: 196356 - protein, 7 aa, synthetic construct
RGRADSP

SEQ ID NO: 196357 - protein, 7 aa, synthetic construct
TARMDSK

SEQ ID NO: 196358 - protein, 7 aa, synthetic construct
TGQVEKR

SEQ ID NO: 196359 - protein, 7 aa, synthetic construct
TGRVHGV

SEQ ID NO: 196360 - protein, 7 aa, synthetic construct
YGRVDVK

SEQ ID NO: 196361 - protein, 7 aa, synthetic construct
TAGRDSR

SEQ ID NO: 196362 - protein, 7 aa, synthetic construct
KPRVDSM

SEQ ID NO: 196363 - protein, 7 aa, synthetic construct
TRAVDLR

SEQ ID NO: 196364 - protein, 7 aa, synthetic construct
TGRSNDR

SEQ ID NO: 196365 - protein, 7 aa, synthetic construct
QGRVDLK

SEQ ID NO: 196366 - protein, 7 aa, synthetic construct
YGRVMSS

SEQ ID NO: 196367 - protein, 7 aa, synthetic construct
TGRASSV

SEQ ID NO: 196368 - protein, 7 aa, synthetic construct
TRSVDLR

SEQ ID NO: 196369 - protein, 7 aa, synthetic construct
TGRVRTE

SEQ ID NO: 196370 - protein, 7 aa, synthetic construct
TARKDSL

SEQ ID NO: 196371 - protein, 7 aa, synthetic construct
LGRVSER

SEQ ID NO: 196372 - protein, 7 aa, synthetic construct
TQRVDSR

SEQ ID NO: 196373 - protein, 7 aa, synthetic construct
FARNDSR

SEQ ID NO: 196374 - protein, 7 aa, synthetic construct
TRMVDGR

SEQ ID NO: 196375 - protein, 7 aa, synthetic construct
MNRTDSR

SEQ ID NO: 196376 - protein, 7 aa, synthetic construct
KFPVDSR

SEQ ID NO: 196377 - protein, 7 aa, synthetic construct
QGRVTSN

SEQ ID NO: 196378 - protein, 7 aa, synthetic construct
TQRVDKM

SEQ ID NO: 196379 - protein, 7 aa, synthetic construct
TRRVESP

SEQ ID NO: 196380 - protein, 7 aa, synthetic construct
IGRVDRG

SEQ ID NO: 196381 - protein, 7 aa, synthetic construct
IGRQDGR

SEQ ID NO: 196382 - protein, 7 aa, synthetic construct
TFTKDSR

SEQ ID NO: 196383 - protein, 7 aa, synthetic construct
IGREASR

SEQ ID NO: 196384 - protein, 7 aa, synthetic construct
TGRVKGD

SEQ ID NO: 196385 - protein, 7 aa, synthetic construct
LGRVQSS

SEQ ID NO: 196386 - protein, 7 aa, synthetic construct
TNRNDLR

SEQ ID NO: 196387 - protein, 7 aa, synthetic construct
TAGVDRR

SEQ ID NO: 196388 - protein, 7 aa, synthetic construct
GGRQDVR

SEQ ID NO: 196389 - protein, 7 aa, synthetic construct
TQRKDSS

SEQ ID NO: 196390 - protein, 7 aa, synthetic construct
QGRNESR

SEQ ID NO: 196391 - protein, 7 aa, synthetic construct
TSQVDKR

SEQ ID NO: 196392 - protein, 7 aa, synthetic construct
VGRVISA

SEQ ID NO: 196393 - protein, 7 aa, synthetic construct
TMRVKSD

SEQ ID NO: 196394 - protein, 7 aa, synthetic construct
RTRVDSP

SEQ ID NO: 196395 - protein, 7 aa, synthetic construct
YGKVDLR

SEQ ID NO: 196396 - protein, 7 aa, synthetic construct
TSRVNER

SEQ ID NO: 196397 - protein, 7 aa, synthetic construct
FLKVDSR

SEQ ID NO: 196398 - protein, 7 aa, synthetic construct
TKSLDSR

SEQ ID NO: 196399 - protein, 7 aa, synthetic construct
TGRGDKL

SEQ ID NO: 196400 - protein, 7 aa, synthetic construct
TIKGDSR

SEQ ID NO: 196401 - protein, 7 aa, synthetic construct
QGRVIER

SEQ ID NO: 196402 - protein, 7 aa, synthetic construct
TGHKESR

SEQ ID NO: 196403 - protein, 7 aa, synthetic construct
TQHKDSR

SEQ ID NO: 196404 - protein, 7 aa, synthetic construct
TGRPISL

SEQ ID NO: 196405 - protein, 7 aa, synthetic construct
TERVVSR

SEQ ID NO: 196406 - protein, 7 aa, synthetic construct
TGDVARR

SEQ ID NO: 196407 - protein, 7 aa, synthetic construct
LNRTDSR

SEQ ID NO: 196408 - protein, 7 aa, synthetic construct
GSRVDNR

SEQ ID NO: 196409 - protein, 7 aa, synthetic construct
TGRVNAL

SEQ ID NO: 196410 - protein, 7 aa, synthetic construct
KGRVESI

SEQ ID NO: 196411 - protein, 7 aa, synthetic construct
TGHVSSR

SEQ ID NO: 196412 - protein, 7 aa, synthetic construct
TGRTDKN

SEQ ID NO: 196413 - protein, 7 aa, synthetic construct
TDRPTSR

SEQ ID NO: 196414 - protein, 7 aa, synthetic construct
TGRTDKM

SEQ ID NO: 196415 - protein, 7 aa, synthetic construct
TGRSGER

SEQ ID NO: 196416 - protein, 7 aa, synthetic construct
TKRVDSV

SEQ ID NO: 196417 - protein, 7 aa, synthetic construct
TGRLHSA

SEQ ID NO: 196418 - protein, 7 aa, synthetic construct
TSRVDRT

SEQ ID NO: 196419 - protein, 7 aa, synthetic construct
IGRVDSK

SEQ ID NO: 196420 - protein, 7 aa, synthetic construct
VNRGDSR

SEQ ID NO: 196421 - protein, 7 aa, synthetic construct
TGDARSR

SEQ ID NO: 196422 - protein, 7 aa, synthetic construct
IGRVQSS

SEQ ID NO: 196423 - protein, 7 aa, synthetic construct
IRAVDSR

SEQ ID NO: 196424 - protein, 7 aa, synthetic construct
TLRKDSI

SEQ ID NO: 196425 - protein, 7 aa, synthetic construct
DKRVDLR

SEQ ID NO: 196426 - protein, 7 aa, synthetic construct
TDRVRSV

SEQ ID NO: 196427 - protein, 7 aa, synthetic construct
TGRNTSN

SEQ ID NO: 196428 - protein, 7 aa, synthetic construct
TAEVKSR

SEQ ID NO: 196429 - protein, 7 aa, synthetic construct
TDRVKSH

SEQ ID NO: 196430 - protein, 7 aa, synthetic construct
SARNDSR

SEQ ID NO: 196431 - protein, 7 aa, synthetic construct
QDRVQSR

SEQ ID NO: 196432 - protein, 7 aa, synthetic construct
MGRVISQ

SEQ ID NO: 196433 - protein, 7 aa, synthetic construct
MTRVESR

SEQ ID NO: 196434 - protein, 7 aa, synthetic construct
HGRVQSG

SEQ ID NO: 196435 - protein, 7 aa, synthetic construct
IGRVMSQ

SEQ ID NO: 196436 - protein, 7 aa, synthetic construct
TGAADRR

SEQ ID NO: 196437 - protein, 7 aa, synthetic construct
IPRQDSR

SEQ ID NO: 196438 - protein, 7 aa, synthetic construct
TGRVTHS

SEQ ID NO: 196439 - protein, 7 aa, synthetic construct
YKREDSR

SEQ ID NO: 196440 - protein, 7 aa, synthetic construct
QGRVNER

SEQ ID NO: 196441 - protein, 7 aa, synthetic construct
QGRVSSV

SEQ ID NO: 196442 - protein, 7 aa, synthetic construct
TGRGSSI

SEQ ID NO: 196443 - protein, 7 aa, synthetic construct
TGRGDQK

SEQ ID NO: 196444 - protein, 7 aa, synthetic construct
QGRVELR

SEQ ID NO: 196445 - protein, 7 aa, synthetic construct
TGRSTSV

SEQ ID NO: 196446 - protein, 7 aa, synthetic construct
TGTVDRR

SEQ ID NO: 196447 - protein, 7 aa, synthetic construct
FKAVDSR

SEQ ID NO: 196448 - protein, 7 aa, synthetic construct
TYKVDSK

SEQ ID NO: 196449 - protein, 7 aa, synthetic construct
TTKYDSR

SEQ ID NO: 196450 - protein, 7 aa, synthetic construct
TARNDVR

SEQ ID NO: 196451 - protein, 7 aa, synthetic construct
TKRIDSV

SEQ ID NO: 196452 - protein, 7 aa, synthetic construct
TGRGPSN

SEQ ID NO: 196453 - protein, 7 aa, synthetic construct
FGRVDTK

SEQ ID NO: 196454 - protein, 7 aa, synthetic construct
TGGVKSH

SEQ ID NO: 196455 - protein, 7 aa, synthetic construct
TNRVIER

SEQ ID NO: 196456 - protein, 7 aa, synthetic construct
KGRVDQM

SEQ ID NO: 196457 - protein, 7 aa, synthetic construct
QGRQDAR

SEQ ID NO: 196458 - protein, 7 aa, synthetic construct
IGRVDKI

SEQ ID NO: 196459 - protein, 7 aa, synthetic construct
TDGVKSR

SEQ ID NO: 196460 - protein, 7 aa, synthetic construct
TDRSTSR

SEQ ID NO: 196461 - protein, 7 aa, synthetic construct
QGRAESR

SEQ ID NO: 196462 - protein, 7 aa, synthetic construct
TGRKDMT

SEQ ID NO: 196463 - protein, 7 aa, synthetic construct
KFRDDSR

SEQ ID NO: 196464 - protein, 7 aa, synthetic construct
TGRASSM

SEQ ID NO: 196465 - protein, 7 aa, synthetic construct
TSRSDVR

SEQ ID NO: 196466 - protein, 7 aa, synthetic construct
TGKNDGR

SEQ ID NO: 196467 - protein, 7 aa, synthetic construct
AGRVEPR

SEQ ID NO: 196468 - protein, 7 aa, synthetic construct
TGRQNER

SEQ ID NO: 196469 - protein, 7 aa, synthetic construct
SGRVSSS

SEQ ID NO: 196470 - protein, 7 aa, synthetic construct
TGSVERR

SEQ ID NO: 196471 - protein, 7 aa, synthetic construct
TGKVFSQ

SEQ ID NO: 196472 - protein, 7 aa, synthetic construct
TKRVDVI

SEQ ID NO: 196473 - protein, 7 aa, synthetic construct
AGRGDIR

SEQ ID NO: 196474 - protein, 7 aa, synthetic construct
VGRVSSH

SEQ ID NO: 196475 - protein, 7 aa, synthetic construct
MGKVDQR

SEQ ID NO: 196476 - protein, 7 aa, synthetic construct
TRQVDGR

SEQ ID NO: 196477 - protein, 7 aa, synthetic construct
TGRQHSG

SEQ ID NO: 196478 - protein, 7 aa, synthetic construct
TSRELSR

SEQ ID NO: 196479 - protein, 7 aa, synthetic construct
NRAVDSR

SEQ ID NO: 196480 - protein, 7 aa, synthetic construct
MGKVDLR

SEQ ID NO: 196481 - protein, 7 aa, synthetic construct
TGRNQSL

SEQ ID NO: 196482 - protein, 7 aa, synthetic construct
HGRVVSS

SEQ ID NO: 196483 - protein, 7 aa, synthetic construct
TGRVQNL

SEQ ID NO: 196484 - protein, 7 aa, synthetic construct
TPRVNER

SEQ ID NO: 196485 - protein, 7 aa, synthetic construct
THRVVSS

SEQ ID NO: 196486 - protein, 7 aa, synthetic construct
TGRSTER

SEQ ID NO: 196487 - protein, 7 aa, synthetic construct
MGRVDVR

SEQ ID NO: 196488 - protein, 7 aa, synthetic construct
TEKVVSR

SEQ ID NO: 196489 - protein, 7 aa, synthetic construct
TGRVAHQ

SEQ ID NO: 196490 - protein, 7 aa, synthetic construct
TSRADQR

SEQ ID NO: 196491 - protein, 7 aa, synthetic construct
TGRQTSL

SEQ ID NO: 196492 - protein, 7 aa, synthetic construct
NNRVESR

SEQ ID NO: 196493 - protein, 7 aa, synthetic construct
VGRVDKG

SEQ ID NO: 196494 - protein, 7 aa, synthetic construct
RGSVESR

SEQ ID NO: 196495 - protein, 7 aa, synthetic construct
TDRVAQR

SEQ ID NO: 196496 - protein, 7 aa, synthetic construct
VGRQDMR

SEQ ID NO: 196497 - protein, 7 aa, synthetic construct
TSRVEGR

SEQ ID NO: 196498 - protein, 7 aa, synthetic construct
KGRVISD

SEQ ID NO: 196499 - protein, 7 aa, synthetic construct
TGRSVER

SEQ ID NO: 196500 - protein, 7 aa, synthetic construct
LGRTDQR

SEQ ID NO: 196501 - protein, 7 aa, synthetic construct
TDRVIAR

SEQ ID NO: 196502 - protein, 7 aa, synthetic construct
SSRVDSR

SEQ ID NO: 196503 - protein, 7 aa, synthetic construct
KERVDMR

SEQ ID NO: 196504 - protein, 7 aa, synthetic construct
TGNIDKR

SEQ ID NO: 196505 - protein, 7 aa, synthetic construct
FGRVNSP

SEQ ID NO: 196506 - protein, 7 aa, synthetic construct
FGRVGSG

SEQ ID NO: 196507 - protein, 7 aa, synthetic construct
YGRVVSA

SEQ ID NO: 196508 - protein, 7 aa, synthetic construct
TGRMDKM

SEQ ID NO: 196509 - protein, 7 aa, synthetic construct
ATRQDSR

SEQ ID NO: 196510 - protein, 7 aa, synthetic construct
TERVKSS

SEQ ID NO: 196511 - protein, 7 aa, synthetic construct
KGNTDSR

SEQ ID NO: 196512 - protein, 7 aa, synthetic construct
ADRVPSR

SEQ ID NO: 196513 - protein, 7 aa, synthetic construct
INRNDSR

SEQ ID NO: 196514 - protein, 7 aa, synthetic construct
TNRPESR

SEQ ID NO: 196515 - protein, 7 aa, synthetic construct
TGHVTGR

SEQ ID NO: 196516 - protein, 7 aa, synthetic construct
MKRDDSR

SEQ ID NO: 196517 - protein, 7 aa, synthetic construct
ASRVDSK

SEQ ID NO: 196518 - protein, 7 aa, synthetic construct
KGSGDSR

SEQ ID NO: 196519 - protein, 7 aa, synthetic construct
TPRKDER

SEQ ID NO: 196520 - protein, 7 aa, synthetic construct
QGRQDGR

SEQ ID NO: 196521 - protein, 7 aa, synthetic construct
TGRKDTS

SEQ ID NO: 196522 - protein, 7 aa, synthetic construct
TGRMDQK

SEQ ID NO: 196523 - protein, 7 aa, synthetic construct
TGIGDKR

SEQ ID NO: 196524 - protein, 7 aa, synthetic construct
TGRQDTR

SEQ ID NO: 196525 - protein, 7 aa, synthetic construct
QGRVAER

SEQ ID NO: 196526 - protein, 7 aa, synthetic construct
TGHVSSK

SEQ ID NO: 196527 - protein, 7 aa, synthetic construct
TERGLSR

SEQ ID NO: 196528 - protein, 7 aa, synthetic construct
TTRVDKF

SEQ ID NO: 196529 - protein, 7 aa, synthetic construct
TGRQDGR

SEQ ID NO: 196530 - protein, 7 aa, synthetic construct
TERVRSS

SEQ ID NO: 196531 - protein, 7 aa, synthetic construct
TVRQDLR

SEQ ID NO: 196532 - protein, 7 aa, synthetic construct
TGQVHPR

SEQ ID NO: 196533 - protein, 7 aa, synthetic construct
TGRVTLA

SEQ ID NO: 196534 - protein, 7 aa, synthetic construct
TGPVERR

SEQ ID NO: 196535 - protein, 7 aa, synthetic construct
KGTVDGR

SEQ ID NO: 196536 - protein, 7 aa, synthetic construct
LGRQDAR

SEQ ID NO: 196537 - protein, 7 aa, synthetic construct
TQRVQDR

SEQ ID NO: 196538 - protein, 7 aa, synthetic construct
TSRESSR

SEQ ID NO: 196539 - protein, 7 aa, synthetic construct
TQKSDSR

SEQ ID NO: 196540 - protein, 7 aa, synthetic construct
TRNVDQR

SEQ ID NO: 196541 - protein, 7 aa, synthetic construct
TSRVEAR

SEQ ID NO: 196542 - protein, 7 aa, synthetic construct
TSRADVR

SEQ ID NO: 196543 - protein, 7 aa, synthetic construct
ARNVDSR

SEQ ID NO: 196544 - protein, 7 aa, synthetic construct
QNKVDSR

SEQ ID NO: 196545 - protein, 7 aa, synthetic construct
ITRGDSR

SEQ ID NO: 196546 - protein, 7 aa, synthetic construct
TGDKYSR

SEQ ID NO: 196547 - protein, 7 aa, synthetic construct
HSKVDSR

SEQ ID NO: 196548 - protein, 7 aa, synthetic construct
TDRGVSR

SEQ ID NO: 196549 - protein, 7 aa, synthetic construct
YGRVHSG

SEQ ID NO: 196550 - protein, 7 aa, synthetic construct
TGYVKSG

SEQ ID NO: 196551 - protein, 7 aa, synthetic construct
TGRPDAK

SEQ ID NO: 196552 - protein, 7 aa, synthetic construct
VGRVNER

SEQ ID NO: 196553 - protein, 7 aa, synthetic construct
TDRVTAR

SEQ ID NO: 196554 - protein, 7 aa, synthetic construct
TGRVQKE

SEQ ID NO: 196555 - protein, 7 aa, synthetic construct
AVRQDSR

SEQ ID NO: 196556 - protein, 7 aa, synthetic construct
IGRNDNR

SEQ ID NO: 196557 - protein, 7 aa, synthetic construct
TVRVRSD

SEQ ID NO: 196558 - protein, 7 aa, synthetic construct
TGRTDRA

SEQ ID NO: 196559 - protein, 7 aa, synthetic construct
VMRQDSR

SEQ ID NO: 196560 - protein, 7 aa, synthetic construct
GGRGDVR

SEQ ID NO: 196561 - protein, 7 aa, synthetic construct
TGRVVRE

SEQ ID NO: 196562 - protein, 7 aa, synthetic construct
SVRNDSR

SEQ ID NO: 196563 - protein, 7 aa, synthetic construct
MGRVVSN

SEQ ID NO: 196564 - protein, 7 aa, synthetic construct
GKRVDSG

SEQ ID NO: 196565 - protein, 7 aa, synthetic construct
FGNKDSR

SEQ ID NO: 196566 - protein, 7 aa, synthetic construct
AFKVDSR

SEQ ID NO: 196567 - protein, 7 aa, synthetic construct
TVRVNER

SEQ ID NO: 196568 - protein, 7 aa, synthetic construct
TGRVERI

SEQ ID NO: 196569 - protein, 7 aa, synthetic construct
TKRVMSE

SEQ ID NO: 196570 - protein, 7 aa, synthetic construct
TGRQHSV

SEQ ID NO: 196571 - protein, 7 aa, synthetic construct
KERVDIR

SEQ ID NO: 196572 - protein, 7 aa, synthetic construct
RGEVSSR

SEQ ID NO: 196573 - protein, 7 aa, synthetic construct
TGTVGHR

SEQ ID NO: 196574 - protein, 7 aa, synthetic construct
SGRVISS

SEQ ID NO: 196575 - protein, 7 aa, synthetic construct
AVRVESR

SEQ ID NO: 196576 - protein, 7 aa, synthetic construct
MGAVDKR

SEQ ID NO: 196577 - protein, 7 aa, synthetic construct
TGRTSSM

SEQ ID NO: 196578 - protein, 7 aa, synthetic construct
TGRHVSI

SEQ ID NO: 196579 - protein, 7 aa, synthetic construct
TGRVSNN

SEQ ID NO: 196580 - protein, 7 aa, synthetic construct
TMRTESR

SEQ ID NO: 196581 - protein, 7 aa, synthetic construct
GGRGDMR

SEQ ID NO: 196582 - protein, 7 aa, synthetic construct
IKRVDSS

SEQ ID NO: 196583 - protein, 7 aa, synthetic construct
TGKSDNR

SEQ ID NO: 196584 - protein, 7 aa, synthetic construct
TGRSQSV

SEQ ID NO: 196585 - protein, 7 aa, synthetic construct
KGRPDDR

SEQ ID NO: 196586 - protein, 7 aa, synthetic construct
QGRQDSK

SEQ ID NO: 196587 - protein, 7 aa, synthetic construct
TKRDDTR

SEQ ID NO: 196588 - protein, 7 aa, synthetic construct
MSRADSR

SEQ ID NO: 196589 - protein, 7 aa, synthetic construct
TLRETSR

SEQ ID NO: 196590 - protein, 7 aa, synthetic construct
TQRVADR

SEQ ID NO: 196591 - protein, 7 aa, synthetic construct
TGSKDSR

SEQ ID NO: 196592 - protein, 7 aa, synthetic construct
IGRVTSA

SEQ ID NO: 196593 - protein, 7 aa, synthetic construct
QGRADAR

SEQ ID NO: 196594 - protein, 7 aa, synthetic construct
TDRKDQR

SEQ ID NO: 196595 - protein, 7 aa, synthetic construct
QGRTDSK

SEQ ID NO: 196596 - protein, 7 aa, synthetic construct
IGRVIST

SEQ ID NO: 196597 - protein, 7 aa, synthetic construct
TVRKDDR

SEQ ID NO: 196598 - protein, 7 aa, synthetic construct
TGRHQSV

SEQ ID NO: 196599 - protein, 7 aa, synthetic construct
TGRHTSI

SEQ ID NO: 196600 - protein, 7 aa, synthetic construct
TARNDTR

SEQ ID NO: 196601 - protein, 7 aa, synthetic construct
TKRDDNR

SEQ ID NO: 196602 - protein, 7 aa, synthetic construct
TRRVDGP

SEQ ID NO: 196603 - protein, 7 aa, synthetic construct
LGRKDSA

SEQ ID NO: 196604 - protein, 7 aa, synthetic construct
TGTHVSR

SEQ ID NO: 196605 - protein, 7 aa, synthetic construct
TARVRSD

SEQ ID NO: 196606 - protein, 7 aa, synthetic construct
TGRLDKV

SEQ ID NO: 196607 - protein, 7 aa, synthetic construct
TSRTDAR

SEQ ID NO: 196608 - protein, 7 aa, synthetic construct
AGRVDKN

SEQ ID NO: 196609 - protein, 7 aa, synthetic construct
TGKKDSL

SEQ ID NO: 196610 - protein, 7 aa, synthetic construct
TSHVPSR

SEQ ID NO: 196611 - protein, 7 aa, synthetic construct
TGRQDAR

SEQ ID NO: 196612 - protein, 7 aa, synthetic construct
TGPKDYR

SEQ ID NO: 196613 - protein, 7 aa, synthetic construct
LGKQDSR

SEQ ID NO: 196614 - protein, 7 aa, synthetic construct
LGRVDLK

SEQ ID NO: 196615 - protein, 7 aa, synthetic construct
MGRVDKP

SEQ ID NO: 196616 - protein, 7 aa, synthetic construct
ARAVDSR

SEQ ID NO: 196617 - protein, 7 aa, synthetic construct
TERIPSR

SEQ ID NO: 196618 - protein, 7 aa, synthetic construct
AKRDDSR

SEQ ID NO: 196619 - protein, 7 aa, synthetic construct
TGAMDKR

SEQ ID NO: 196620 - protein, 7 aa, synthetic construct
TGRMETR

SEQ ID NO: 196621 - protein, 7 aa, synthetic construct
TPRTDNR

SEQ ID NO: 196622 - protein, 7 aa, synthetic construct
TTHKDSR

SEQ ID NO: 196623 - protein, 7 aa, synthetic construct
TRGVDGR

SEQ ID NO: 196624 - protein, 7 aa, synthetic construct
TERVNQR

SEQ ID NO: 196625 - protein, 7 aa, synthetic construct
QGRVASA

SEQ ID NO: 196626 - protein, 7 aa, synthetic construct
TGKVHSM

SEQ ID NO: 196627 - protein, 7 aa, synthetic construct
IGRQDQR

SEQ ID NO: 196628 - protein, 7 aa, synthetic construct
TDRVQQR

SEQ ID NO: 196629 - protein, 7 aa, synthetic construct
TKHVDMR

SEQ ID NO: 196630 - protein, 7 aa, synthetic construct
TGRVHSG

SEQ ID NO: 196631 - protein, 7 aa, synthetic construct
TKRSDSP

SEQ ID NO: 196632 - protein, 7 aa, synthetic construct
TGLADKR

SEQ ID NO: 196633 - protein, 7 aa, synthetic construct
TARSESR

SEQ ID NO: 196634 - protein, 7 aa, synthetic construct
TGRPASL

SEQ ID NO: 196635 - protein, 7 aa, synthetic construct
LGRVQSN

SEQ ID NO: 196636 - protein, 7 aa, synthetic construct
DGRVKSM

SEQ ID NO: 196637 - protein, 7 aa, synthetic construct
TGRLDKF

SEQ ID NO: 196638 - protein, 7 aa, synthetic construct
LGRIDSK

SEQ ID NO: 196639 - protein, 7 aa, synthetic construct
TGHGGSR

SEQ ID NO: 196640 - protein, 7 aa, synthetic construct
NQRVESR

SEQ ID NO: 196641 - protein, 7 aa, synthetic construct
DARVQSR

SEQ ID NO: 196642 - protein, 7 aa, synthetic construct
KGPSDSR

SEQ ID NO: 196643 - protein, 7 aa, synthetic construct
TEPVRSR

SEQ ID NO: 196644 - protein, 7 aa, synthetic construct
ANRVDSR

SEQ ID NO: 196645 - protein, 7 aa, synthetic construct
DQRVASR

SEQ ID NO: 196646 - protein, 7 aa, synthetic construct
ITRSDSR

SEQ ID NO: 196647 - protein, 7 aa, synthetic construct
TGRVNKE

SEQ ID NO: 196648 - protein, 7 aa, synthetic construct
MGRVMSN

SEQ ID NO: 196649 - protein, 7 aa, synthetic construct
VGRTDSK

SEQ ID NO: 196650 - protein, 7 aa, synthetic construct
QVRNDSR

SEQ ID NO: 196651 - protein, 7 aa, synthetic construct
VPRVDGR

SEQ ID NO: 196652 - protein, 7 aa, synthetic construct
MGRQDIR

SEQ ID NO: 196653 - protein, 7 aa, synthetic construct
DGKVSSR

SEQ ID NO: 196654 - protein, 7 aa, synthetic construct
AKRVDSS

SEQ ID NO: 196655 - protein, 7 aa, synthetic construct
RSRVDSP

SEQ ID NO: 196656 - protein, 7 aa, synthetic construct
QGRVHSS

SEQ ID NO: 196657 - protein, 7 aa, synthetic construct
TGKKDDR

SEQ ID NO: 196658 - protein, 7 aa, synthetic construct
VGRNDTR

SEQ ID NO: 196659 - protein, 7 aa, synthetic construct
RQAVDSR

SEQ ID NO: 196660 - protein, 7 aa, synthetic construct
TGDFKSR

SEQ ID NO: 196661 - protein, 7 aa, synthetic construct
THRVTSG

SEQ ID NO: 196662 - protein, 7 aa, synthetic construct
TGRHLSS

SEQ ID NO: 196663 - protein, 7 aa, synthetic construct
TGRTEMR

SEQ ID NO: 196664 - protein, 7 aa, synthetic construct
TGKPDAR

SEQ ID NO: 196665 - protein, 7 aa, synthetic construct
QGRVQER

SEQ ID NO: 196666 - protein, 7 aa, synthetic construct
TERANSR

SEQ ID NO: 196667 - protein, 7 aa, synthetic construct
YGRVISN

SEQ ID NO: 196668 - protein, 7 aa, synthetic construct
QGDVRSR

SEQ ID NO: 196669 - protein, 7 aa, synthetic construct
EGRVKSG

SEQ ID NO: 196670 - protein, 7 aa, synthetic construct
KERADSR

SEQ ID NO: 196671 - protein, 7 aa, synthetic construct
IGGVDRR

SEQ ID NO: 196672 - protein, 7 aa, synthetic construct
TKQYDSR

SEQ ID NO: 196673 - protein, 7 aa, synthetic construct
MGRVQER

SEQ ID NO: 196674 - protein, 7 aa, synthetic construct
VGRVTSI

SEQ ID NO: 196675 - protein, 7 aa, synthetic construct
SGKVDLR

SEQ ID NO: 196676 - protein, 7 aa, synthetic construct
TNREDRR

SEQ ID NO: 196677 - protein, 7 aa, synthetic construct
MGRTDTR

SEQ ID NO: 196678 - protein, 7 aa, synthetic construct
AARGDSR

SEQ ID NO: 196679 - protein, 7 aa, synthetic construct
TGRLDKL

SEQ ID NO: 196680 - protein, 7 aa, synthetic construct
TERVQTR

SEQ ID NO: 196681 - protein, 7 aa, synthetic construct
KGRDDNR

SEQ ID NO: 196682 - protein, 7 aa, synthetic construct
AGRVVER

SEQ ID NO: 196683 - protein, 7 aa, synthetic construct
QGRVSSG

SEQ ID NO: 196684 - protein, 7 aa, synthetic construct
KGRVMSD

SEQ ID NO: 196685 - protein, 7 aa, synthetic construct
ISRQDSR

SEQ ID NO: 196686 - protein, 7 aa, synthetic construct
TTPVDRR

SEQ ID NO: 196687 - protein, 7 aa, synthetic construct
TQRVVDR

SEQ ID NO: 196688 - protein, 7 aa, synthetic construct
TGRQMDR

SEQ ID NO: 196689 - protein, 7 aa, synthetic construct
TVRETSR

SEQ ID NO: 196690 - protein, 7 aa, synthetic construct
TKQIDSR

SEQ ID NO: 196691 - protein, 7 aa, synthetic construct
TGRTENR

SEQ ID NO: 196692 - protein, 7 aa, synthetic construct
KTHVDSR

SEQ ID NO: 196693 - protein, 7 aa, synthetic construct
SGRVAER

SEQ ID NO: 196694 - protein, 7 aa, synthetic construct
TKRMDSA

SEQ ID NO: 196695 - protein, 7 aa, synthetic construct
IGRVEQR

SEQ ID NO: 196696 - protein, 7 aa, synthetic construct
KGSIDSR

SEQ ID NO: 196697 - protein, 7 aa, synthetic construct
YGRVDKS

SEQ ID NO: 196698 - protein, 7 aa, synthetic construct
IGRVISS

SEQ ID NO: 196699 - protein, 7 aa, synthetic construct
THAVDKR

SEQ ID NO: 196700 - protein, 7 aa, synthetic construct
TGRVTDR

SEQ ID NO: 196701 - protein, 7 aa, synthetic construct
TGKVYSG

SEQ ID NO: 196702 - protein, 7 aa, synthetic construct
TGRTHSA

SEQ ID NO: 196703 - protein, 7 aa, synthetic construct
KGRVDSG

SEQ ID NO: 196704 - protein, 7 aa, synthetic construct
KGRDDSR

SEQ ID NO: 196705 - protein, 7 aa, synthetic construct
IGRIDAR

SEQ ID NO: 196706 - protein, 7 aa, synthetic construct
TEKVHSR

SEQ ID NO: 196707 - protein, 7 aa, synthetic construct
MGRVQSN

SEQ ID NO: 196708 - protein, 7 aa, synthetic construct
TRVNDSR

SEQ ID NO: 196709 - protein, 7 aa, synthetic construct
QSRVDTR

SEQ ID NO: 196710 - protein, 7 aa, synthetic construct
QGRVDRG

SEQ ID NO: 196711 - protein, 7 aa, synthetic construct
TNRVENR

SEQ ID NO: 196712 - protein, 7 aa, synthetic construct
TGRMESK

SEQ ID NO: 196713 - protein, 7 aa, synthetic construct
TGRVHTL

SEQ ID NO: 196714 - protein, 7 aa, synthetic construct
TGRVTGN

SEQ ID NO: 196715 - protein, 7 aa, synthetic construct
TKRVDTV

SEQ ID NO: 196716 - protein, 7 aa, synthetic construct
TDPVKSR

SEQ ID NO: 196717 - protein, 7 aa, synthetic construct
FGKVDHR

SEQ ID NO: 196718 - protein, 7 aa, synthetic construct
DKRADSR

SEQ ID NO: 196719 - protein, 7 aa, synthetic construct
YGREDKR

SEQ ID NO: 196720 - protein, 7 aa, synthetic construct
GPRNDSR

SEQ ID NO: 196721 - protein, 7 aa, synthetic construct
TGRIDKA

SEQ ID NO: 196722 - protein, 7 aa, synthetic construct
TGPHVSR

SEQ ID NO: 196723 - protein, 7 aa, synthetic construct
AGKNDSR

SEQ ID NO: 196724 - protein, 7 aa, synthetic construct
NRVVDSR

SEQ ID NO: 196725 - protein, 7 aa, synthetic construct
THRVDKP

SEQ ID NO: 196726 - protein, 7 aa, synthetic construct
TKNNDSR

SEQ ID NO: 196727 - protein, 7 aa, synthetic construct
QFKVDSR

SEQ ID NO: 196728 - protein, 7 aa, synthetic construct
TGHAGSR

SEQ ID NO: 196729 - protein, 7 aa, synthetic construct
QGRVSSP

SEQ ID NO: 196730 - protein, 7 aa, synthetic construct
IGRVLSH

SEQ ID NO: 196731 - protein, 7 aa, synthetic construct
TGRETLR

SEQ ID NO: 196732 - protein, 7 aa, synthetic construct
TGRVSPL

SEQ ID NO: 196733 - protein, 7 aa, synthetic construct
TKGFDSR

SEQ ID NO: 196734 - protein, 7 aa, synthetic construct
SGRVDRS

SEQ ID NO: 196735 - protein, 7 aa, synthetic construct
QKRVDSG

SEQ ID NO: 196736 - protein, 7 aa, synthetic construct
THRVISS

SEQ ID NO: 196737 - protein, 7 aa, synthetic construct
TKRDDFR

SEQ ID NO: 196738 - protein, 7 aa, synthetic construct
QGRVDQR

SEQ ID NO: 196739 - protein, 7 aa, synthetic construct
TGRSELR

SEQ ID NO: 196740 - protein, 7 aa, synthetic construct
TGRVSIA

SEQ ID NO: 196741 - protein, 7 aa, synthetic construct
TGSHGSR

SEQ ID NO: 196742 - protein, 7 aa, synthetic construct
TARGDSK

SEQ ID NO: 196743 - protein, 7 aa, synthetic construct
IGRVEAR

SEQ ID NO: 196744 - protein, 7 aa, synthetic construct
TEAVKSR

SEQ ID NO: 196745 - protein, 7 aa, synthetic construct
IGRGESR

SEQ ID NO: 196746 - protein, 7 aa, synthetic construct
TGRNSSA

SEQ ID NO: 196747 - protein, 7 aa, synthetic construct
LKRVDSV

SEQ ID NO: 196748 - protein, 7 aa, synthetic construct
TPSVDRR

SEQ ID NO: 196749 - protein, 7 aa, synthetic construct
TFDVKSR

SEQ ID NO: 196750 - protein, 7 aa, synthetic construct
TKREDSR

SEQ ID NO: 196751 - protein, 7 aa, synthetic construct
KIGVDSR

SEQ ID NO: 196752 - protein, 7 aa, synthetic construct
TKRVDQG

SEQ ID NO: 196753 - protein, 7 aa, synthetic construct
STRVDNR

SEQ ID NO: 196754 - protein, 7 aa, synthetic construct
TGRVEFK

SEQ ID NO: 196755 - protein, 7 aa, synthetic construct
NKHVDSR

SEQ ID NO: 196756 - protein, 7 aa, synthetic construct
QTRVDPR

SEQ ID NO: 196757 - protein, 7 aa, synthetic construct
TGRVERT

SEQ ID NO: 196758 - protein, 7 aa, synthetic construct
LQRSDSR

SEQ ID NO: 196759 - protein, 7 aa, synthetic construct
TGRHISA

SEQ ID NO: 196760 - protein, 7 aa, synthetic construct
TDKRDSR

SEQ ID NO: 196761 - protein, 7 aa, synthetic construct
TQNVDKR

SEQ ID NO: 196762 - protein, 7 aa, synthetic construct
TGRSDGR

SEQ ID NO: 196763 - protein, 7 aa, synthetic construct
TEVVKSR

SEQ ID NO: 196764 - protein, 7 aa, synthetic construct
IGRLDSK

SEQ ID NO: 196765 - protein, 7 aa, synthetic construct
MGRVVSS

SEQ ID NO: 196766 - protein, 7 aa, synthetic construct
TGRSDKG

SEQ ID NO: 196767 - protein, 7 aa, synthetic construct
GQRGDSR

SEQ ID NO: 196768 - protein, 7 aa, synthetic construct
TGRNDKM

SEQ ID NO: 196769 - protein, 7 aa, synthetic construct
TGDPRSR

SEQ ID NO: 196770 - protein, 7 aa, synthetic construct
TGRGDKV

SEQ ID NO: 196771 - protein, 7 aa, synthetic construct
TGEVAKR

SEQ ID NO: 196772 - protein, 7 aa, synthetic construct
MQRVDSR

SEQ ID NO: 196773 - protein, 7 aa, synthetic construct
LARGDSR

SEQ ID NO: 196774 - protein, 7 aa, synthetic construct
VDRVGSR

SEQ ID NO: 196775 - protein, 7 aa, synthetic construct
QARVDVR

SEQ ID NO: 196776 - protein, 7 aa, synthetic construct
TGRNDLR

SEQ ID NO: 196777 - protein, 7 aa, synthetic construct
TGERMSR

SEQ ID NO: 196778 - protein, 7 aa, synthetic construct
GRVVDSR

SEQ ID NO: 196779 - protein, 7 aa, synthetic construct
QGEVKSR

SEQ ID NO: 196780 - protein, 7 aa, synthetic construct
IGRGDQR

SEQ ID NO: 196781 - protein, 7 aa, synthetic construct
QTRVESR

SEQ ID NO: 196782 - protein, 7 aa, synthetic construct
KGRVDGF

SEQ ID NO: 196783 - protein, 7 aa, synthetic construct
TNRVDKH

SEQ ID NO: 196784 - protein, 7 aa, synthetic construct
QGKIDSR

SEQ ID NO: 196785 - protein, 7 aa, synthetic construct
TERMPSR

SEQ ID NO: 196786 - protein, 7 aa, synthetic construct
TERVKST

SEQ ID NO: 196787 - protein, 7 aa, synthetic construct
QGRVDTR

SEQ ID NO: 196788 - protein, 7 aa, synthetic construct
TGDVTRR

SEQ ID NO: 196789 - protein, 7 aa, synthetic construct
TGRQTSV

SEQ ID NO: 196790 - protein, 7 aa, synthetic construct
TGTVHGR

SEQ ID NO: 196791 - protein, 7 aa, synthetic construct
TNRVDAK

SEQ ID NO: 196792 - protein, 7 aa, synthetic construct
TGRKDSI

SEQ ID NO: 196793 - protein, 7 aa, synthetic construct
TGRIDKV

SEQ ID NO: 196794 - protein, 7 aa, synthetic construct
KGGVDNR

SEQ ID NO: 196795 - protein, 7 aa, synthetic construct
KFNVDSR

SEQ ID NO: 196796 - protein, 7 aa, synthetic construct
TGRDEKR

SEQ ID NO: 196797 - protein, 7 aa, synthetic construct
TFRVDKN

SEQ ID NO: 196798 - protein, 7 aa, synthetic construct
RQPVDSR

SEQ ID NO: 196799 - protein, 7 aa, synthetic construct
TGRVDKQ

SEQ ID NO: 196800 - protein, 7 aa, synthetic construct
IGRVNSN

SEQ ID NO: 196801 - protein, 7 aa, synthetic construct
LGRADSK

SEQ ID NO: 196802 - protein, 7 aa, synthetic construct
TIRVSER

SEQ ID NO: 196803 - protein, 7 aa, synthetic construct
IGRVPER

SEQ ID NO: 196804 - protein, 7 aa, synthetic construct
TDRSISR

SEQ ID NO: 196805 - protein, 7 aa, synthetic construct
QGRVTER

SEQ ID NO: 196806 - protein, 7 aa, synthetic construct
TGRVSHT

SEQ ID NO: 196807 - protein, 7 aa, synthetic construct
TMEVKSR

SEQ ID NO: 196808 - protein, 7 aa, synthetic construct
TTRSDVR

SEQ ID NO: 196809 - protein, 7 aa, synthetic construct
TGRGSST

SEQ ID NO: 196810 - protein, 7 aa, synthetic construct
TRTVDPR

SEQ ID NO: 196811 - protein, 7 aa, synthetic construct
KTRVDSM

SEQ ID NO: 196812 - protein, 7 aa, synthetic construct
LPRTDSR

SEQ ID NO: 196813 - protein, 7 aa, synthetic construct
TNKMDSR

SEQ ID NO: 196814 - protein, 7 aa, synthetic construct
SKGVDSR

SEQ ID NO: 196815 - protein, 7 aa, synthetic construct
TGRVDKS

SEQ ID NO: 196816 - protein, 7 aa, synthetic construct
TRTTDSR

SEQ ID NO: 196817 - protein, 7 aa, synthetic construct
TGRVMHG

SEQ ID NO: 196818 - protein, 7 aa, synthetic construct
PDRKDSR

SEQ ID NO: 196819 - protein, 7 aa, synthetic construct
QGRVLSA

SEQ ID NO: 196820 - protein, 7 aa, synthetic construct
TERVNSR

SEQ ID NO: 196821 - protein, 7 aa, synthetic construct
TGGVDRK

SEQ ID NO: 196822 - protein, 7 aa, synthetic construct
IGRVNSH

SEQ ID NO: 196823 - protein, 7 aa, synthetic construct
LDRVTSR

SEQ ID NO: 196824 - protein, 7 aa, synthetic construct
TGKEHSR

SEQ ID NO: 196825 - protein, 7 aa, synthetic construct
TGRVKTE

SEQ ID NO: 196826 - protein, 7 aa, synthetic construct
RGRVDSP

SEQ ID NO: 196827 - protein, 7 aa, synthetic construct
SGRVTSS

SEQ ID NO: 196828 - protein, 7 aa, synthetic construct
TERQQSR

SEQ ID NO: 196829 - protein, 7 aa, synthetic construct
TGRKDIS

SEQ ID NO: 196830 - protein, 7 aa, synthetic construct
AGRVDNK

SEQ ID NO: 196831 - protein, 7 aa, synthetic construct
TEQVRSR

SEQ ID NO: 196832 - protein, 7 aa, synthetic construct
SGRVSDR

SEQ ID NO: 196833 - protein, 7 aa, synthetic construct
TRNIDSR

SEQ ID NO: 196834 - protein, 7 aa, synthetic construct
LGKVDMR

SEQ ID NO: 196835 - protein, 7 aa, synthetic construct
IDRVASR

SEQ ID NO: 196836 - protein, 7 aa, synthetic construct
IGRVMSV

SEQ ID NO: 196837 - protein, 7 aa, synthetic construct
TERVIPR

SEQ ID NO: 196838 - protein, 7 aa, synthetic construct
TSRVDKN

SEQ ID NO: 196839 - protein, 7 aa, synthetic construct
TRAVDNR

SEQ ID NO: 196840 - protein, 7 aa, synthetic construct
IGREVSR

SEQ ID NO: 196841 - protein, 7 aa, synthetic construct
TGRADNK

SEQ ID NO: 196842 - protein, 7 aa, synthetic construct
TSRVEQR

SEQ ID NO: 196843 - protein, 7 aa, synthetic construct
TKYSDSR

SEQ ID NO: 196844 - protein, 7 aa, synthetic construct
TARVDKM

SEQ ID NO: 196845 - protein, 7 aa, synthetic construct
KGRTDSL

SEQ ID NO: 196846 - protein, 7 aa, synthetic construct
TGRNDKL

SEQ ID NO: 196847 - protein, 7 aa, synthetic construct
TGGKDGR

SEQ ID NO: 196848 - protein, 7 aa, synthetic construct
TKGMDSR

SEQ ID NO: 196849 - protein, 7 aa, synthetic construct
TDRVKSI

SEQ ID NO: 196850 - protein, 7 aa, synthetic construct
TGRVERP

SEQ ID NO: 196851 - protein, 7 aa, synthetic construct
TKFVDNR

SEQ ID NO: 196852 - protein, 7 aa, synthetic construct
IGRVDKN

SEQ ID NO: 196853 - protein, 7 aa, synthetic construct
TGDRASR

SEQ ID NO: 196854 - protein, 7 aa, synthetic construct
TKRDDSR

SEQ ID NO: 196855 - protein, 7 aa, synthetic construct
IGRVSSV

SEQ ID NO: 196856 - protein, 7 aa, synthetic construct
TIPRDSR

SEQ ID NO: 196857 - protein, 7 aa, synthetic construct
GGRVHSA

SEQ ID NO: 196858 - protein, 7 aa, synthetic construct
TPTVDRR

SEQ ID NO: 196859 - protein, 7 aa, synthetic construct
TGRKDGV

SEQ ID NO: 196860 - protein, 7 aa, synthetic construct
TGRNSSS

SEQ ID NO: 196861 - protein, 7 aa, synthetic construct
KGTVDAR

SEQ ID NO: 196862 - protein, 7 aa, synthetic construct
TGKQESR

SEQ ID NO: 196863 - protein, 7 aa, synthetic construct
QGKVDTR

SEQ ID NO: 196864 - protein, 7 aa, synthetic construct
TGRQQDR

SEQ ID NO: 196865 - protein, 7 aa, synthetic construct
TGMVEKR

SEQ ID NO: 196866 - protein, 7 aa, synthetic construct
TGREITR

SEQ ID NO: 196867 - protein, 7 aa, synthetic construct
TGRTEQR

SEQ ID NO: 196868 - protein, 7 aa, synthetic construct
DKRVDIR

SEQ ID NO: 196869 - protein, 7 aa, synthetic construct
TGKFESR

SEQ ID NO: 196870 - protein, 7 aa, synthetic construct
TGRAISL

SEQ ID NO: 196871 - protein, 7 aa, synthetic construct
YPRVDSR

SEQ ID NO: 196872 - protein, 7 aa, synthetic construct
QGRVEGR

SEQ ID NO: 196873 - protein, 7 aa, synthetic construct
TGRPHSG

SEQ ID NO: 196874 - protein, 7 aa, synthetic construct
VGRVSSG

SEQ ID NO: 196875 - protein, 7 aa, synthetic construct
KSRVDST

SEQ ID NO: 196876 - protein, 7 aa, synthetic construct
TKTMDSR

SEQ ID NO: 196877 - protein, 7 aa, synthetic construct
SGEVKSR

SEQ ID NO: 196878 - protein, 7 aa, synthetic construct
TGRESTR

SEQ ID NO: 196879 - protein, 7 aa, synthetic construct
TVRSDGR

SEQ ID NO: 196880 - protein, 7 aa, synthetic construct
TTRTESR

SEQ ID NO: 196881 - protein, 7 aa, synthetic construct
KGSVDSR

SEQ ID NO: 196882 - protein, 7 aa, synthetic construct
TGRLVER

SEQ ID NO: 196883 - protein, 7 aa, synthetic construct
TANVDKR

SEQ ID NO: 196884 - protein, 7 aa, synthetic construct
TERVKSN

SEQ ID NO: 196885 - protein, 7 aa, synthetic construct
TGRSDSR

SEQ ID NO: 196886 - protein, 7 aa, synthetic construct
THRVNSG

SEQ ID NO: 196887 - protein, 7 aa, synthetic construct
TERVASK

SEQ ID NO: 196888 - protein, 7 aa, synthetic construct
VGRVEPR

SEQ ID NO: 196889 - protein, 7 aa, synthetic construct
FGRVTSG

SEQ ID NO: 196890 - protein, 7 aa, synthetic construct
TGRVTHL

SEQ ID NO: 196891 - protein, 7 aa, synthetic construct
YGRVISA

SEQ ID NO: 196892 - protein, 7 aa, synthetic construct
VSRGDSR

SEQ ID NO: 196893 - protein, 7 aa, synthetic construct
KARVDER

SEQ ID NO: 196894 - protein, 7 aa, synthetic construct
TGRVPKE

SEQ ID NO: 196895 - protein, 7 aa, synthetic construct
GTRVDSK

SEQ ID NO: 196896 - protein, 7 aa, synthetic construct
KGRLDSP

SEQ ID NO: 196897 - protein, 7 aa, synthetic construct
TMRVQDR

SEQ ID NO: 196898 - protein, 7 aa, synthetic construct
TFRKDSV

SEQ ID NO: 196899 - protein, 7 aa, synthetic construct
IGRVDKP

SEQ ID NO: 196900 - protein, 7 aa, synthetic construct
TARVETR

SEQ ID NO: 196901 - protein, 7 aa, synthetic construct
TRNVDAR

SEQ ID NO: 196902 - protein, 7 aa, synthetic construct
TGRVQHS

SEQ ID NO: 196903 - protein, 7 aa, synthetic construct
QGRVMSA

SEQ ID NO: 196904 - protein, 7 aa, synthetic construct
MGRVESK

SEQ ID NO: 196905 - protein, 7 aa, synthetic construct
TKHVDPR

SEQ ID NO: 196906 - protein, 7 aa, synthetic construct
TGRVNPA

SEQ ID NO: 196907 - protein, 7 aa, synthetic construct
TARADNR

SEQ ID NO: 196908 - protein, 7 aa, synthetic construct
TGRPVDR

SEQ ID NO: 196909 - protein, 7 aa, synthetic construct
TGRVKDY

SEQ ID NO: 196910 - protein, 7 aa, synthetic construct
TGRVERM

SEQ ID NO: 196911 - protein, 7 aa, synthetic construct
KGRVDGY

SEQ ID NO: 196912 - protein, 7 aa, synthetic construct
LTRSDSR

SEQ ID NO: 196913 - protein, 7 aa, synthetic construct
LGRVGDR

SEQ ID NO: 196914 - protein, 7 aa, synthetic construct
VGRGDQR

SEQ ID NO: 196915 - protein, 7 aa, synthetic construct
VGRVLSH

SEQ ID NO: 196916 - protein, 7 aa, synthetic construct
MGRTDAR

SEQ ID NO: 196917 - protein, 7 aa, synthetic construct
TTRQDVR

SEQ ID NO: 196918 - protein, 7 aa, synthetic construct
TKRVDQS

SEQ ID NO: 196919 - protein, 7 aa, synthetic construct
SGRVQDR

SEQ ID NO: 196920 - protein, 7 aa, synthetic construct
TDRQISR

SEQ ID NO: 196921 - protein, 7 aa, synthetic construct
IGTVHSR

SEQ ID NO: 196922 - protein, 7 aa, synthetic construct
TRTVDTR

SEQ ID NO: 196923 - protein, 7 aa, synthetic construct
VNRADSR

SEQ ID NO: 196924 - protein, 7 aa, synthetic construct
TANVDRR

SEQ ID NO: 196925 - protein, 7 aa, synthetic construct
HGPVTSR

SEQ ID NO: 196926 - protein, 7 aa, synthetic construct
INRSDSR

SEQ ID NO: 196927 - protein, 7 aa, synthetic construct
INRVDVR

SEQ ID NO: 196928 - protein, 7 aa, synthetic construct
TGLNDKR

SEQ ID NO: 196929 - protein, 7 aa, synthetic construct
QGRVVSA

SEQ ID NO: 196930 - protein, 7 aa, synthetic construct
TKRVVSD

SEQ ID NO: 196931 - protein, 7 aa, synthetic construct
QERVASR

SEQ ID NO: 196932 - protein, 7 aa, synthetic construct
TGRNDKT

SEQ ID NO: 196933 - protein, 7 aa, synthetic construct
TERVNNR

SEQ ID NO: 196934 - protein, 7 aa, synthetic construct
KGRVDIG

SEQ ID NO: 196935 - protein, 7 aa, synthetic construct
TNRIESR

SEQ ID NO: 196936 - protein, 7 aa, synthetic construct
TGRVSSG

SEQ ID NO: 196937 - protein, 7 aa, synthetic construct
LSRSDSR

SEQ ID NO: 196938 - protein, 7 aa, synthetic construct
LSRVDNR

SEQ ID NO: 196939 - protein, 7 aa, synthetic construct
TGRNDNK

SEQ ID NO: 196940 - protein, 7 aa, synthetic construct
VGRVNDR

SEQ ID NO: 196941 - protein, 7 aa, synthetic construct
TDRPDKR

SEQ ID NO: 196942 - protein, 7 aa, synthetic construct
QGKVDMR

SEQ ID NO: 196943 - protein, 7 aa, synthetic construct
KGLQDSR

SEQ ID NO: 196944 - protein, 7 aa, synthetic construct
GDRVISR

SEQ ID NO: 196945 - protein, 7 aa, synthetic construct
TERGMSR

SEQ ID NO: 196946 - protein, 7 aa, synthetic construct
TKTVDHR

SEQ ID NO: 196947 - protein, 7 aa, synthetic construct
KDRADSR

SEQ ID NO: 196948 - protein, 7 aa, synthetic construct
TGRNISS

SEQ ID NO: 196949 - protein, 7 aa, synthetic construct
QGPVDRR

SEQ ID NO: 196950 - protein, 7 aa, synthetic construct
ASRVESR

SEQ ID NO: 196951 - protein, 7 aa, synthetic construct
TGRNASL

SEQ ID NO: 196952 - protein, 7 aa, synthetic construct
TIRKDSA

SEQ ID NO: 196953 - protein, 7 aa, synthetic construct
SGKADSR

SEQ ID NO: 196954 - protein, 7 aa, synthetic construct
TQKNDSR

SEQ ID NO: 196955 - protein, 7 aa, synthetic construct
TGRGGDR

SEQ ID NO: 196956 - protein, 7 aa, synthetic construct
TGKVDRH

SEQ ID NO: 196957 - protein, 7 aa, synthetic construct
YGRVTSA

SEQ ID NO: 196958 - protein, 7 aa, synthetic construct
NDRVISR

SEQ ID NO: 196959 - protein, 7 aa, synthetic construct
VGRVVSH

SEQ ID NO: 196960 - protein, 7 aa, synthetic construct
THKVDAR

SEQ ID NO: 196961 - protein, 7 aa, synthetic construct
TNRVDKY

SEQ ID NO: 196962 - protein, 7 aa, synthetic construct
TGRVVER

SEQ ID NO: 196963 - protein, 7 aa, synthetic construct
TGRSDKV

SEQ ID NO: 196964 - protein, 7 aa, synthetic construct
VKRVDSM

SEQ ID NO: 196965 - protein, 7 aa, synthetic construct
QGKVDSR

SEQ ID NO: 196966 - protein, 7 aa, synthetic construct
KQRVDSL

SEQ ID NO: 196967 - protein, 7 aa, synthetic construct
TGRVSAI

SEQ ID NO: 196968 - protein, 7 aa, synthetic construct
TDHVKSR

SEQ ID NO: 196969 - protein, 7 aa, synthetic construct
TGRATSG

SEQ ID NO: 196970 - protein, 7 aa, synthetic construct
TDRVMAR

SEQ ID NO: 196971 - protein, 7 aa, synthetic construct
TGKDHSR

SEQ ID NO: 196972 - protein, 7 aa, synthetic construct
YGRVDKA

SEQ ID NO: 196973 - protein, 7 aa, synthetic construct
TKRVTSE

SEQ ID NO: 196974 - protein, 7 aa, synthetic construct
NVRNDSR

SEQ ID NO: 196975 - protein, 7 aa, synthetic construct
TERVPAR

SEQ ID NO: 196976 - protein, 7 aa, synthetic construct
TSRVDKY

SEQ ID NO: 196977 - protein, 7 aa, synthetic construct
SRNVDSR

SEQ ID NO: 196978 - protein, 7 aa, synthetic construct
VGAVDRR

SEQ ID NO: 196979 - protein, 7 aa, synthetic construct
LGRDDKR

SEQ ID NO: 196980 - protein, 7 aa, synthetic construct
VGRVRSE

SEQ ID NO: 196981 - protein, 7 aa, synthetic construct
TTRVELR

SEQ ID NO: 196982 - protein, 7 aa, synthetic construct
TGRVSIN

SEQ ID NO: 196983 - protein, 7 aa, synthetic construct
TGRSDKA

SEQ ID NO: 196984 - protein, 7 aa, synthetic construct
FQKVDSR

SEQ ID NO: 196985 - protein, 7 aa, synthetic construct
YGKVDNR

SEQ ID NO: 196986 - protein, 7 aa, synthetic construct
TGRISSA

SEQ ID NO: 196987 - protein, 7 aa, synthetic construct
VGRVLSG

SEQ ID NO: 196988 - protein, 7 aa, synthetic construct
KGRSDSV

SEQ ID NO: 196989 - protein, 7 aa, synthetic construct
VSRVDLR

SEQ ID NO: 196990 - protein, 7 aa, synthetic construct
TGHKDGR

SEQ ID NO: 196991 - protein, 7 aa, synthetic construct
SGRKDSA

SEQ ID NO: 196992 - protein, 7 aa, synthetic construct
TGREASK

SEQ ID NO: 196993 - protein, 7 aa, synthetic construct
TGEIRSR

SEQ ID NO: 196994 - protein, 7 aa, synthetic construct
TQRNDSR

SEQ ID NO: 196995 - protein, 7 aa, synthetic construct
TGKRDSA

SEQ ID NO: 196996 - protein, 7 aa, synthetic construct
INRQDSR

SEQ ID NO: 196997 - protein, 7 aa, synthetic construct
VGRADSR

SEQ ID NO: 196998 - protein, 7 aa, synthetic construct
VGRGDTR

SEQ ID NO: 196999 - protein, 7 aa, synthetic construct
TGRANSA

SEQ ID NO: 197000 - protein, 7 aa, synthetic construct
LGRSDSK

SEQ ID NO: 197001 - protein, 7 aa, synthetic construct
TGRNNSA

SEQ ID NO: 197002 - protein, 7 aa, synthetic construct
TSAVHSR

SEQ ID NO: 197003 - protein, 7 aa, synthetic construct
TGKMDVR

SEQ ID NO: 197004 - protein, 7 aa, synthetic construct
TDRVPGR

SEQ ID NO: 197005 - protein, 7 aa, synthetic construct
SGRVNSG

SEQ ID NO: 197006 - protein, 7 aa, synthetic construct
GGRVTDR

SEQ ID NO: 197007 - protein, 7 aa, synthetic construct
TGRIHSG

SEQ ID NO: 197008 - protein, 7 aa, synthetic construct
TKRVISE

SEQ ID NO: 197009 - protein, 7 aa, synthetic construct
DGRVVSK

SEQ ID NO: 197010 - protein, 7 aa, synthetic construct
VGRTDSR

SEQ ID NO: 197011 - protein, 7 aa, synthetic construct
TGSVQHR

SEQ ID NO: 197012 - protein, 7 aa, synthetic construct
MGRVDPR

SEQ ID NO: 197013 - protein, 7 aa, synthetic construct
QGRVTST

SEQ ID NO: 197014 - protein, 7 aa, synthetic construct
LGNRDSR

SEQ ID NO: 197015 - protein, 7 aa, synthetic construct
IGRVSSQ

SEQ ID NO: 197016 - protein, 7 aa, synthetic construct
TGRGPER

SEQ ID NO: 197017 - protein, 7 aa, synthetic construct
TGKVEGR

SEQ ID NO: 197018 - protein, 7 aa, synthetic construct
NIRVESR

SEQ ID NO: 197019 - protein, 7 aa, synthetic construct
TVGRDSR

SEQ ID NO: 197020 - protein, 7 aa, synthetic construct
QPRTDSR

SEQ ID NO: 197021 - protein, 7 aa, synthetic construct
MGRVQSL

SEQ ID NO: 197022 - protein, 7 aa, synthetic construct
IGRVSSH

SEQ ID NO: 197023 - protein, 7 aa, synthetic construct
TNRVEPR

SEQ ID NO: 197024 - protein, 7 aa, synthetic construct
TGRHLSV

SEQ ID NO: 197025 - protein, 7 aa, synthetic construct
DGRVPGR

SEQ ID NO: 197026 - protein, 7 aa, synthetic construct
KGRDDIR

SEQ ID NO: 197027 - protein, 7 aa, synthetic construct
TTGVHSR

SEQ ID NO: 197028 - protein, 7 aa, synthetic construct
TGRSQSL

SEQ ID NO: 197029 - protein, 7 aa, synthetic construct
TKGIDSR

SEQ ID NO: 197030 - protein, 7 aa, synthetic construct
TGRQEVR

SEQ ID NO: 197031 - protein, 7 aa, synthetic construct
TARESSR

SEQ ID NO: 197032 - protein, 7 aa, synthetic construct
DKRVDGR

SEQ ID NO: 197033 - protein, 7 aa, synthetic construct
TGRAVSN

SEQ ID NO: 197034 - protein, 7 aa, synthetic construct
KGRVDML

SEQ ID NO: 197035 - protein, 7 aa, synthetic construct
TDRMASR

SEQ ID NO: 197036 - protein, 7 aa, synthetic construct
TGRVHQQ

SEQ ID NO: 197037 - protein, 7 aa, synthetic construct
VGRKDSP

SEQ ID NO: 197038 - protein, 7 aa, synthetic construct
RGEVISR

SEQ ID NO: 197039 - protein, 7 aa, synthetic construct
TGRVRDM

SEQ ID NO: 197040 - protein, 7 aa, synthetic construct
TTRVTER

SEQ ID NO: 197041 - protein, 7 aa, synthetic construct
TKNSDSR

SEQ ID NO: 197042 - protein, 7 aa, synthetic construct
MGRADTR

SEQ ID NO: 197043 - protein, 7 aa, synthetic construct
TGRENIR

SEQ ID NO: 197044 - protein, 7 aa, synthetic construct
TGRTEPR

SEQ ID NO: 197045 - protein, 7 aa, synthetic construct
VPRVDAR

SEQ ID NO: 197046 - protein, 7 aa, synthetic construct
LGRSDSR

SEQ ID NO: 197047 - protein, 7 aa, synthetic construct
KGRVDLI

SEQ ID NO: 197048 - protein, 7 aa, synthetic construct
KERMDSR

SEQ ID NO: 197049 - protein, 7 aa, synthetic construct
TGRVANN

SEQ ID NO: 197050 - protein, 7 aa, synthetic construct
TIRKDSM

SEQ ID NO: 197051 - protein, 7 aa, synthetic construct
TGTERSR

SEQ ID NO: 197052 - protein, 7 aa, synthetic construct
TLREVSR

SEQ ID NO: 197053 - protein, 7 aa, synthetic construct
TSREGSR

SEQ ID NO: 197054 - protein, 7 aa, synthetic construct
TGRKDFV

SEQ ID NO: 197055 - protein, 7 aa, synthetic construct
TDRVPMR

SEQ ID NO: 197056 - protein, 7 aa, synthetic construct
TGRKDPV

SEQ ID NO: 197057 - protein, 7 aa, synthetic construct
TGRENVR

SEQ ID NO: 197058 - protein, 7 aa, synthetic construct
KGRVVSD

SEQ ID NO: 197059 - protein, 7 aa, synthetic construct
VGRSDSR

SEQ ID NO: 197060 - protein, 7 aa, synthetic construct
TGRVVKD

SEQ ID NO: 197061 - protein, 7 aa, synthetic construct
TARNESR

SEQ ID NO: 197062 - protein, 7 aa, synthetic construct
TDRVKSF

SEQ ID NO: 197063 - protein, 7 aa, synthetic construct
VGRIESR

SEQ ID NO: 197064 - protein, 7 aa, synthetic construct
TKNVDYR

SEQ ID NO: 197065 - protein, 7 aa, synthetic construct
MNRIDSR

SEQ ID NO: 197066 - protein, 7 aa, synthetic construct
TGRNEMR

SEQ ID NO: 197067 - protein, 7 aa, synthetic construct
VGRTDAR

SEQ ID NO: 197068 - protein, 7 aa, synthetic construct
TRSQDSR

SEQ ID NO: 197069 - protein, 7 aa, synthetic construct
NRRVDSP

SEQ ID NO: 197070 - protein, 7 aa, synthetic construct
TERVTLR

SEQ ID NO: 197071 - protein, 7 aa, synthetic construct
TGDVVRR

SEQ ID NO: 197072 - protein, 7 aa, synthetic construct
TTRNDSR

SEQ ID NO: 197073 - protein, 7 aa, synthetic construct
MQRVDAR

SEQ ID NO: 197074 - protein, 7 aa, synthetic construct
TGRVSSH

SEQ ID NO: 197075 - protein, 7 aa, synthetic construct
LGRVDKL

SEQ ID NO: 197076 - protein, 7 aa, synthetic construct
TGRVLRD

SEQ ID NO: 197077 - protein, 7 aa, synthetic construct
TGRMSSV

SEQ ID NO: 197078 - protein, 7 aa, synthetic construct
TGRVKSE

SEQ ID NO: 197079 - protein, 7 aa, synthetic construct
KGMVDGR

SEQ ID NO: 197080 - protein, 7 aa, synthetic construct
TGRDKSG

SEQ ID NO: 197081 - protein, 7 aa, synthetic construct
LGRVSSM

SEQ ID NO: 197082 - protein, 7 aa, synthetic construct
FVRSDSR

SEQ ID NO: 197083 - protein, 7 aa, synthetic construct
VNRVDPR

SEQ ID NO: 197084 - protein, 7 aa, synthetic construct
RSAVDSR

SEQ ID NO: 197085 - protein, 7 aa, synthetic construct
SSRVDPR

SEQ ID NO: 197086 - protein, 7 aa, synthetic construct
TGRSEIR

SEQ ID NO: 197087 - protein, 7 aa, synthetic construct
TRQVDAR

SEQ ID NO: 197088 - protein, 7 aa, synthetic construct
TIRNESR

SEQ ID NO: 197089 - protein, 7 aa, synthetic construct
TGRGASI

SEQ ID NO: 197090 - protein, 7 aa, synthetic construct
TGSVHSK

SEQ ID NO: 197091 - protein, 7 aa, synthetic construct
TGDNRSR

SEQ ID NO: 197092 - protein, 7 aa, synthetic construct
TGRAISG

SEQ ID NO: 197093 - protein, 7 aa, synthetic construct
TGRSESK

SEQ ID NO: 197094 - protein, 7 aa, synthetic construct
LGRESSR

SEQ ID NO: 197095 - protein, 7 aa, synthetic construct
KERVDLR

SEQ ID NO: 197096 - protein, 7 aa, synthetic construct
TARVEAR

SEQ ID NO: 197097 - protein, 7 aa, synthetic construct
DGKVMSR

SEQ ID NO: 197098 - protein, 7 aa, synthetic construct
QGRKDSI

SEQ ID NO: 197099 - protein, 7 aa, synthetic construct
TKRVDQL

SEQ ID NO: 197100 - protein, 7 aa, synthetic construct
TGPAHSR

SEQ ID NO: 197101 - protein, 7 aa, synthetic construct
TTRVEQR

SEQ ID NO: 197102 - protein, 7 aa, synthetic construct
TDRTISR

SEQ ID NO: 197103 - protein, 7 aa, synthetic construct
TDRIDKR

SEQ ID NO: 197104 - protein, 7 aa, synthetic construct
TGKQDLR

SEQ ID NO: 197105 - protein, 7 aa, synthetic construct
TGVQDKR

SEQ ID NO: 197106 - protein, 7 aa, synthetic construct
LGRVQDR

SEQ ID NO: 197107 - protein, 7 aa, synthetic construct
TARGDNR

SEQ ID NO: 197108 - protein, 7 aa, synthetic construct
VGRGDVR

SEQ ID NO: 197109 - protein, 7 aa, synthetic construct
TGRTNER

SEQ ID NO: 197110 - protein, 7 aa, synthetic construct
VSRVDSR

SEQ ID NO: 197111 - protein, 7 aa, synthetic construct
RGTVDGR

SEQ ID NO: 197112 - protein, 7 aa, synthetic construct
TGIVEKR

SEQ ID NO: 197113 - protein, 7 aa, synthetic construct
TGAGDRR

SEQ ID NO: 197114 - protein, 7 aa, synthetic construct
TNRVDKS

SEQ ID NO: 197115 - protein, 7 aa, synthetic construct
TGRITER

SEQ ID NO: 197116 - protein, 7 aa, synthetic construct
LGTKDSR

SEQ ID NO: 197117 - protein, 7 aa, synthetic construct
TGRTEAR

SEQ ID NO: 197118 - protein, 7 aa, synthetic construct
ILRGDSR

SEQ ID NO: 197119 - protein, 7 aa, synthetic construct
ISRGDSR

SEQ ID NO: 197120 - protein, 7 aa, synthetic construct
VPRNDSR

SEQ ID NO: 197121 - protein, 7 aa, synthetic construct
TMRSDSK

SEQ ID NO: 197122 - protein, 7 aa, synthetic construct
TRSVDTR

SEQ ID NO: 197123 - protein, 7 aa, synthetic construct
TERMTSR

SEQ ID NO: 197124 - protein, 7 aa, synthetic construct
SGRVSSG

SEQ ID NO: 197125 - protein, 7 aa, synthetic construct
TGRVIHS

SEQ ID NO: 197126 - protein, 7 aa, synthetic construct
TSKNDSR

SEQ ID NO: 197127 - protein, 7 aa, synthetic construct
VGRVMSG

SEQ ID NO: 197128 - protein, 7 aa, synthetic construct
TVEVRSR

SEQ ID NO: 197129 - protein, 7 aa, synthetic construct
AGGKDSR

SEQ ID NO: 197130 - protein, 7 aa, synthetic construct
TGERVSR

SEQ ID NO: 197131 - protein, 7 aa, synthetic construct
IVRSDSR

SEQ ID NO: 197132 - protein, 7 aa, synthetic construct
EPRVNSR

SEQ ID NO: 197133 - protein, 7 aa, synthetic construct
MKRVDSA

SEQ ID NO: 197134 - protein, 7 aa, synthetic construct
TGRAEAR

SEQ ID NO: 197135 - protein, 7 aa, synthetic construct
TGRQVSN

SEQ ID NO: 197136 - protein, 7 aa, synthetic construct
TKFGDSR

SEQ ID NO: 197137 - protein, 7 aa, synthetic construct
THRVLSG

SEQ ID NO: 197138 - protein, 7 aa, synthetic construct
MGSVDKR

SEQ ID NO: 197139 - protein, 7 aa, synthetic construct
TSRKDSG

SEQ ID NO: 197140 - protein, 7 aa, synthetic construct
TNRVDKA

SEQ ID NO: 197141 - protein, 7 aa, synthetic construct
TGRLDKN

SEQ ID NO: 197142 - protein, 7 aa, synthetic construct
TGRVQHA

SEQ ID NO: 197143 - protein, 7 aa, synthetic construct
DGPVKSR

SEQ ID NO: 197144 - protein, 7 aa, synthetic construct
TGREIPR

SEQ ID NO: 197145 - protein, 7 aa, synthetic construct
KGGVDPR

SEQ ID NO: 197146 - protein, 7 aa, synthetic construct
FGRVESK

SEQ ID NO: 197147 - protein, 7 aa, synthetic construct
TGKLDGR

SEQ ID NO: 197148 - protein, 7 aa, synthetic construct
QGKMDSR

SEQ ID NO: 197149 - protein, 7 aa, synthetic construct
TKRTDSS

SEQ ID NO: 197150 - protein, 7 aa, synthetic construct
SGRVSSI

SEQ ID NO: 197151 - protein, 7 aa, synthetic construct
DPRVDKR

SEQ ID NO: 197152 - protein, 7 aa, synthetic construct
MKRVDSG

SEQ ID NO: 197153 - protein, 7 aa, synthetic construct
TGNIDRR

SEQ ID NO: 197154 - protein, 7 aa, synthetic construct
KGGVDQR

SEQ ID NO: 197155 - protein, 7 aa, synthetic construct
KGSVDTR

SEQ ID NO: 197156 - protein, 7 aa, synthetic construct
TFREDKR

SEQ ID NO: 197157 - protein, 7 aa, synthetic construct
TGRGDIR

SEQ ID NO: 197158 - protein, 7 aa, synthetic construct
TRDKDSR

SEQ ID NO: 197159 - protein, 7 aa, synthetic construct
RSVVDSR

SEQ ID NO: 197160 - protein, 7 aa, synthetic construct
TGRNDVR

SEQ ID NO: 197161 - protein, 7 aa, synthetic construct
LGRVSSS

SEQ ID NO: 197162 - protein, 7 aa, synthetic construct
IGRSDTR

SEQ ID NO: 197163 - protein, 7 aa, synthetic construct
TGRVSNV

SEQ ID NO: 197164 - protein, 7 aa, synthetic construct
GGRVTER

SEQ ID NO: 197165 - protein, 7 aa, synthetic construct
TDPVRSR

SEQ ID NO: 197166 - protein, 7 aa, synthetic construct
TGRTDGR

SEQ ID NO: 197167 - protein, 7 aa, synthetic construct
IPRVDPR

SEQ ID NO: 197168 - protein, 7 aa, synthetic construct
MGRVQSG

SEQ ID NO: 197169 - protein, 7 aa, synthetic construct
TKGVDQR

SEQ ID NO: 197170 - protein, 7 aa, synthetic construct
TGTADKR

SEQ ID NO: 197171 - protein, 7 aa, synthetic construct
HGRVMSG

SEQ ID NO: 197172 - protein, 7 aa, synthetic construct
PGRVTER

SEQ ID NO: 197173 - protein, 7 aa, synthetic construct
TGRQHST

SEQ ID NO: 197174 - protein, 7 aa, synthetic construct
QGRVASN

SEQ ID NO: 197175 - protein, 7 aa, synthetic construct
TKERDSR

SEQ ID NO: 197176 - protein, 7 aa, synthetic construct
TGRATSI

SEQ ID NO: 197177 - protein, 7 aa, synthetic construct
TGRLHSV

SEQ ID NO: 197178 - protein, 7 aa, synthetic construct
TNRNESR

SEQ ID NO: 197179 - protein, 7 aa, synthetic construct
VGRVAER

SEQ ID NO: 197180 - protein, 7 aa, synthetic construct
MGKGDSR

SEQ ID NO: 197181 - protein, 7 aa, synthetic construct
AKRVDDR

SEQ ID NO: 197182 - protein, 7 aa, synthetic construct
TQRQESR

SEQ ID NO: 197183 - protein, 7 aa, synthetic construct
TGENKSR

SEQ ID NO: 197184 - protein, 7 aa, synthetic construct
TGRHSSV

SEQ ID NO: 197185 - protein, 7 aa, synthetic construct
TERVRSF

SEQ ID NO: 197186 - protein, 7 aa, synthetic construct
TTRRDSP

SEQ ID NO: 197187 - protein, 7 aa, synthetic construct
YGRVSSA

SEQ ID NO: 197188 - protein, 7 aa, synthetic construct
VGRVASG

SEQ ID NO: 197189 - protein, 7 aa, synthetic construct
TLREISR

SEQ ID NO: 197190 - protein, 7 aa, synthetic construct
TGRMHSA

SEQ ID NO: 197191 - protein, 7 aa, synthetic construct
TGRKMSE

SEQ ID NO: 197192 - protein, 7 aa, synthetic construct
TGEVMRR

SEQ ID NO: 197193 - protein, 7 aa, synthetic construct
TGRGMDR

SEQ ID NO: 197194 - protein, 7 aa, synthetic construct
TGRAGDR

SEQ ID NO: 197195 - protein, 7 aa, synthetic construct
TTQVDRR

SEQ ID NO: 197196 - protein, 7 aa, synthetic construct
TGGVSGR

SEQ ID NO: 197197 - protein, 7 aa, synthetic construct
TGRGHSI

SEQ ID NO: 197198 - protein, 7 aa, synthetic construct
TGREIGR

SEQ ID NO: 197199 - protein, 7 aa, synthetic construct
TMAVDKR

SEQ ID NO: 197200 - protein, 7 aa, synthetic construct
TTRDDKR

SEQ ID NO: 197201 - protein, 7 aa, synthetic construct
TAFKDSR

SEQ ID NO: 197202 - protein, 7 aa, synthetic construct
TPRVEQR

SEQ ID NO: 197203 - protein, 7 aa, synthetic construct
TKFNDSR

SEQ ID NO: 197204 - protein, 7 aa, synthetic construct
TKNVDHR

SEQ ID NO: 197205 - protein, 7 aa, synthetic construct
IGRVDRQ

SEQ ID NO: 197206 - protein, 7 aa, synthetic construct
SGSVSSR

SEQ ID NO: 197207 - protein, 7 aa, synthetic construct
MVRGDSR

SEQ ID NO: 197208 - protein, 7 aa, synthetic construct
TGRQVER

SEQ ID NO: 197209 - protein, 7 aa, synthetic construct
TIRVDRG

SEQ ID NO: 197210 - protein, 7 aa, synthetic construct
RTQVDSR

SEQ ID NO: 197211 - protein, 7 aa, synthetic construct
MGRVDLK

SEQ ID NO: 197212 - protein, 7 aa, synthetic construct
INRPDSR

SEQ ID NO: 197213 - protein, 7 aa, synthetic construct
QGRVDRN

SEQ ID NO: 197214 - protein, 7 aa, synthetic construct
TGRSDKI

SEQ ID NO: 197215 - protein, 7 aa, synthetic construct
LNRVDGR

SEQ ID NO: 197216 - protein, 7 aa, synthetic construct
KGRVTSE

SEQ ID NO: 197217 - protein, 7 aa, synthetic construct
TRNTDSR

SEQ ID NO: 197218 - protein, 7 aa, synthetic construct
TGRVHSI

SEQ ID NO: 197219 - protein, 7 aa, synthetic construct
TDRQPSR

SEQ ID NO: 197220 - protein, 7 aa, synthetic construct
TGKEDKR

SEQ ID NO: 197221 - protein, 7 aa, synthetic construct
TGKVYSA

SEQ ID NO: 197222 - protein, 7 aa, synthetic construct
MGKVDGR

SEQ ID NO: 197223 - protein, 7 aa, synthetic construct
VGAVDKR

SEQ ID NO: 197224 - protein, 7 aa, synthetic construct
SSRTDSR

SEQ ID NO: 197225 - protein, 7 aa, synthetic construct
MGRSESR

SEQ ID NO: 197226 - protein, 7 aa, synthetic construct
TTRVKSE

SEQ ID NO: 197227 - protein, 7 aa, synthetic construct
GQRVDSK

SEQ ID NO: 197228 - protein, 7 aa, synthetic construct
DGRVISK

SEQ ID NO: 197229 - protein, 7 aa, synthetic construct
YGRVESK

SEQ ID NO: 197230 - protein, 7 aa, synthetic construct
TGRANSN

SEQ ID NO: 197231 - protein, 7 aa, synthetic construct
TGHVGGR

SEQ ID NO: 197232 - protein, 7 aa, synthetic construct
TERKDVR

SEQ ID NO: 197233 - protein, 7 aa, synthetic construct
TGETRSR

SEQ ID NO: 197234 - protein, 7 aa, synthetic construct
TGRHTSG

SEQ ID NO: 197235 - protein, 7 aa, synthetic construct
TSRAESR

SEQ ID NO: 197236 - protein, 7 aa, synthetic construct
TGREVSK

SEQ ID NO: 197237 - protein, 7 aa, synthetic construct
TKHVDLR

SEQ ID NO: 197238 - protein, 7 aa, synthetic construct
TGSLDKR

SEQ ID NO: 197239 - protein, 7 aa, synthetic construct
TDRVSVR

SEQ ID NO: 197240 - protein, 7 aa, synthetic construct
TRQNDSR

SEQ ID NO: 197241 - protein, 7 aa, synthetic construct
RGSGDSR

SEQ ID NO: 197242 - protein, 7 aa, synthetic construct
QGRVDGK

SEQ ID NO: 197243 - protein, 7 aa, synthetic construct
TGRVHLS

SEQ ID NO: 197244 - protein, 7 aa, synthetic construct
TGRMEPR

SEQ ID NO: 197245 - protein, 7 aa, synthetic construct
TDRVTSK

SEQ ID NO: 197246 - protein, 7 aa, synthetic construct
TGGADKR

SEQ ID NO: 197247 - protein, 7 aa, synthetic construct
TGRADSK

SEQ ID NO: 197248 - protein, 7 aa, synthetic construct
VGRVDKQ

SEQ ID NO: 197249 - protein, 7 aa, synthetic construct
VGRVDRV

SEQ ID NO: 197250 - protein, 7 aa, synthetic construct
VGRVNSL

SEQ ID NO: 197251 - protein, 7 aa, synthetic construct
TGRNQSQ

SEQ ID NO: 197252 - protein, 7 aa, synthetic construct
KGRVDGN

SEQ ID NO: 197253 - protein, 7 aa, synthetic construct
TTRGDLR

SEQ ID NO: 197254 - protein, 7 aa, synthetic construct
TGRMDAK

SEQ ID NO: 197255 - protein, 7 aa, synthetic construct
TGRNNDR

SEQ ID NO: 197256 - protein, 7 aa, synthetic construct
YDRVDKR

SEQ ID NO: 197257 - protein, 7 aa, synthetic construct
VGRVPER

SEQ ID NO: 197258 - protein, 7 aa, synthetic construct
TKRSDSI

SEQ ID NO: 197259 - protein, 7 aa, synthetic construct
EGRVKSA

SEQ ID NO: 197260 - protein, 7 aa, synthetic construct
TERVNTR

SEQ ID NO: 197261 - protein, 7 aa, synthetic construct
VGARDSR

SEQ ID NO: 197262 - protein, 7 aa, synthetic construct
TTRVVER

SEQ ID NO: 197263 - protein, 7 aa, synthetic construct
TGRAPDR

SEQ ID NO: 197264 - protein, 7 aa, synthetic construct
YGRVDPK

SEQ ID NO: 197265 - protein, 7 aa, synthetic construct
TGANDKR

SEQ ID NO: 197266 - protein, 7 aa, synthetic construct
GIRGDSR

SEQ ID NO: 197267 - protein, 7 aa, synthetic construct
RDRVDAR

SEQ ID NO: 197268 - protein, 7 aa, synthetic construct
TGRAEGR

SEQ ID NO: 197269 - protein, 7 aa, synthetic construct
AGRADLR

SEQ ID NO: 197270 - protein, 7 aa, synthetic construct
TARVDSR

SEQ ID NO: 197271 - protein, 7 aa, synthetic construct
TGRNDSR

SEQ ID NO: 197272 - protein, 7 aa, synthetic construct
KGRVDVI

SEQ ID NO: 197273 - protein, 7 aa, synthetic construct
INRVDTR

SEQ ID NO: 197274 - protein, 7 aa, synthetic construct
QGRVLSS

SEQ ID NO: 197275 - protein, 7 aa, synthetic construct
LARSDSR

SEQ ID NO: 197276 - protein, 7 aa, synthetic construct
VTRVDSR

SEQ ID NO: 197277 - protein, 7 aa, synthetic construct
IGRVTSG

SEQ ID NO: 197278 - protein, 7 aa, synthetic construct
IGRVDNR

SEQ ID NO: 197279 - protein, 7 aa, synthetic construct
TGVGDRR

SEQ ID NO: 197280 - protein, 7 aa, synthetic construct
TGKVIDR

SEQ ID NO: 197281 - protein, 7 aa, synthetic construct
IGRVETR

SEQ ID NO: 197282 - protein, 7 aa, synthetic construct
TGRKDGG

SEQ ID NO: 197283 - protein, 7 aa, synthetic construct
QGRVDKF

SEQ ID NO: 197284 - protein, 7 aa, synthetic construct
YGRVLSS

SEQ ID NO: 197285 - protein, 7 aa, synthetic construct
QGRVNSG

SEQ ID NO: 197286 - protein, 7 aa, synthetic construct
TRGVDPR

SEQ ID NO: 197287 - protein, 7 aa, synthetic construct
TKRVDPV

SEQ ID NO: 197288 - protein, 7 aa, synthetic construct
TDRVSIR

SEQ ID NO: 197289 - protein, 7 aa, synthetic construct
LGRVDGR

SEQ ID NO: 197290 - protein, 7 aa, synthetic construct
YGRVTSG

SEQ ID NO: 197291 - protein, 7 aa, synthetic construct
TGRKDNG

SEQ ID NO: 197292 - protein, 7 aa, synthetic construct
TGRGDRL

SEQ ID NO: 197293 - protein, 7 aa, synthetic construct
TGEVNKR

SEQ ID NO: 197294 - protein, 7 aa, synthetic construct
TGRSDKL

SEQ ID NO: 197295 - protein, 7 aa, synthetic construct
YSRVDSK

SEQ ID NO: 197296 - protein, 7 aa, synthetic construct
IGRMDTR

SEQ ID NO: 197297 - protein, 7 aa, synthetic construct
TKRVDGT

SEQ ID NO: 197298 - protein, 7 aa, synthetic construct
TDRQMSR

SEQ ID NO: 197299 - protein, 7 aa, synthetic construct
TGRVTSS

SEQ ID NO: 197300 - protein, 7 aa, synthetic construct
VGRNDQR

SEQ ID NO: 197301 - protein, 7 aa, synthetic construct
TSRVHSS

SEQ ID NO: 197302 - protein, 7 aa, synthetic construct
TKRTDSA

SEQ ID NO: 197303 - protein, 7 aa, synthetic construct
DGRVGVR

SEQ ID NO: 197304 - protein, 7 aa, synthetic construct
MGRGESR

SEQ ID NO: 197305 - protein, 7 aa, synthetic construct
KERVDNR

SEQ ID NO: 197306 - protein, 7 aa, synthetic construct
TVRQDVR

SEQ ID NO: 197307 - protein, 7 aa, synthetic construct
RGRVDGV

SEQ ID NO: 197308 - protein, 7 aa, synthetic construct
TVRVNDR

SEQ ID NO: 197309 - protein, 7 aa, synthetic construct
RMNVDSR

SEQ ID NO: 197310 - protein, 7 aa, synthetic construct
TTDVRSR

SEQ ID NO: 197311 - protein, 7 aa, synthetic construct
DGRVVPR

SEQ ID NO: 197312 - protein, 7 aa, synthetic construct
TGRVENR

SEQ ID NO: 197313 - protein, 7 aa, synthetic construct
LGRDSSR

SEQ ID NO: 197314 - protein, 7 aa, synthetic construct
TERNSSR

SEQ ID NO: 197315 - protein, 7 aa, synthetic construct
TSRVSDR

SEQ ID NO: 197316 - protein, 7 aa, synthetic construct
TARVSDR

SEQ ID NO: 197317 - protein, 7 aa, synthetic construct
TIDVKSR

SEQ ID NO: 197318 - protein, 7 aa, synthetic construct
TGRVKNE

SEQ ID NO: 197319 - protein, 7 aa, synthetic construct
TGRTDKI

SEQ ID NO: 197320 - protein, 7 aa, synthetic construct
KMRVDSV

SEQ ID NO: 197321 - protein, 7 aa, synthetic construct
TSRNDNR

SEQ ID NO: 197322 - protein, 7 aa, synthetic construct
QKRVDSS

SEQ ID NO: 197323 - protein, 7 aa, synthetic construct
TGRVHQA

SEQ ID NO: 197324 - protein, 7 aa, synthetic construct
TARNDPR

SEQ ID NO: 197325 - protein, 7 aa, synthetic construct
HGRVTSG

SEQ ID NO: 197326 - protein, 7 aa, synthetic construct
TGRVSHA

SEQ ID NO: 197327 - protein, 7 aa, synthetic construct
TARVELR

SEQ ID NO: 197328 - protein, 7 aa, synthetic construct
TGRGISN

SEQ ID NO: 197329 - protein, 7 aa, synthetic construct
TDRSLSR

SEQ ID NO: 197330 - protein, 7 aa, synthetic construct
MRAVDSR

SEQ ID NO: 197331 - protein, 7 aa, synthetic construct
TTRVGDR

SEQ ID NO: 197332 - protein, 7 aa, synthetic construct
IGRDTSR

SEQ ID NO: 197333 - protein, 7 aa, synthetic construct
QGRVDRI

SEQ ID NO: 197334 - protein, 7 aa, synthetic construct
NVRADSR

SEQ ID NO: 197335 - protein, 7 aa, synthetic construct
TGRKESL

SEQ ID NO: 197336 - protein, 7 aa, synthetic construct
RATVDSR

SEQ ID NO: 197337 - protein, 7 aa, synthetic construct
TGDNKSR

SEQ ID NO: 197338 - protein, 7 aa, synthetic construct
TSRMESR

SEQ ID NO: 197339 - protein, 7 aa, synthetic construct
TDAVKSR

SEQ ID NO: 197340 - protein, 7 aa, synthetic construct
TKMQDSR

SEQ ID NO: 197341 - protein, 7 aa, synthetic construct
MGRVAER

SEQ ID NO: 197342 - protein, 7 aa, synthetic construct
VNRVESR

SEQ ID NO: 197343 - protein, 7 aa, synthetic construct
TIRGESR

SEQ ID NO: 197344 - protein, 7 aa, synthetic construct
TGRGLDR

SEQ ID NO: 197345 - protein, 7 aa, synthetic construct
MGRNDIR

SEQ ID NO: 197346 - protein, 7 aa, synthetic construct
TGDYKSR

SEQ ID NO: 197347 - protein, 7 aa, synthetic construct
VPRVESR

SEQ ID NO: 197348 - protein, 7 aa, synthetic construct
TTRSDSR

SEQ ID NO: 197349 - protein, 7 aa, synthetic construct
TKRVDIT

SEQ ID NO: 197350 - protein, 7 aa, synthetic construct
TKMSDSR

SEQ ID NO: 197351 - protein, 7 aa, synthetic construct
YGKVDHR

SEQ ID NO: 197352 - protein, 7 aa, synthetic construct
LTRNDSR

SEQ ID NO: 197353 - protein, 7 aa, synthetic construct
TKDVYSR

SEQ ID NO: 197354 - protein, 7 aa, synthetic construct
TERIQSR

SEQ ID NO: 197355 - protein, 7 aa, synthetic construct
MKRVDSV

SEQ ID NO: 197356 - protein, 7 aa, synthetic construct
KGRVDII

SEQ ID NO: 197357 - protein, 7 aa, synthetic construct
TGRASSI

SEQ ID NO: 197358 - protein, 7 aa, synthetic construct
KGRVDAF

SEQ ID NO: 197359 - protein, 7 aa, synthetic construct
TGRPSSQ

SEQ ID NO: 197360 - protein, 7 aa, synthetic construct
TGRTHSS

SEQ ID NO: 197361 - protein, 7 aa, synthetic construct
TGRNDKG

SEQ ID NO: 197362 - protein, 7 aa, synthetic construct
KGRLDSG

SEQ ID NO: 197363 - protein, 7 aa, synthetic construct
TSNVDRR

SEQ ID NO: 197364 - protein, 7 aa, synthetic construct
PGEVKSR

SEQ ID NO: 197365 - protein, 7 aa, synthetic construct
MGRKDSV

SEQ ID NO: 197366 - protein, 7 aa, synthetic construct
AGRVEVR

SEQ ID NO: 197367 - protein, 7 aa, synthetic construct
TGRGMSV

SEQ ID NO: 197368 - protein, 7 aa, synthetic construct
TGRVSGG

SEQ ID NO: 197369 - protein, 7 aa, synthetic construct
TFRVSSA

SEQ ID NO: 197370 - protein, 7 aa, synthetic construct
TPRVQDR

SEQ ID NO: 197371 - protein, 7 aa, synthetic construct
TSRVNDR

SEQ ID NO: 197372 - protein, 7 aa, synthetic construct
TSRGDSR

SEQ ID NO: 197373 - protein, 7 aa, synthetic construct
TGRLNER

SEQ ID NO: 197374 - protein, 7 aa, synthetic construct
TGRVHAT

SEQ ID NO: 197375 - protein, 7 aa, synthetic construct
QGARDSR

SEQ ID NO: 197376 - protein, 7 aa, synthetic construct
TNRVDKF

SEQ ID NO: 197377 - protein, 7 aa, synthetic construct
AGRVDSK

SEQ ID NO: 197378 - protein, 7 aa, synthetic construct
LGRVVSG

SEQ ID NO: 197379 - protein, 7 aa, synthetic construct
TVRESSR

SEQ ID NO: 197380 - protein, 7 aa, synthetic construct
HGRVLSG

SEQ ID NO: 197381 - protein, 7 aa, synthetic construct
TGRDKSA

SEQ ID NO: 197382 - protein, 7 aa, synthetic construct
TNRVDSK

SEQ ID NO: 197383 - protein, 7 aa, synthetic construct
TSRVDGK

SEQ ID NO: 197384 - protein, 7 aa, synthetic construct
GGRTDTR

SEQ ID NO: 197385 - protein, 7 aa, synthetic construct
MKRVDSL

SEQ ID NO: 197386 - protein, 7 aa, synthetic construct
GTRTDSR

SEQ ID NO: 197387 - protein, 7 aa, synthetic construct
TARVTDR

SEQ ID NO: 197388 - protein, 7 aa, synthetic construct
SSRVDNR

SEQ ID NO: 197389 - protein, 7 aa, synthetic construct
GGRVDKV

SEQ ID NO: 197390 - protein, 7 aa, synthetic construct
KQREDSR

SEQ ID NO: 197391 - protein, 7 aa, synthetic construct
VGEVRSR

SEQ ID NO: 197392 - protein, 7 aa, synthetic construct
YDRVSSR

SEQ ID NO: 197393 - protein, 7 aa, synthetic construct
TGRDTSK

SEQ ID NO: 197394 - protein, 7 aa, synthetic construct
TGRVKES

SEQ ID NO: 197395 - protein, 7 aa, synthetic construct
KDRLDSR

SEQ ID NO: 197396 - protein, 7 aa, synthetic construct
KGRVESA

SEQ ID NO: 197397 - protein, 7 aa, synthetic construct
TGAVERR

SEQ ID NO: 197398 - protein, 7 aa, synthetic construct
TRGVDLR

SEQ ID NO: 197399 - protein, 7 aa, synthetic construct
VGRVISQ

SEQ ID NO: 197400 - protein, 7 aa, synthetic construct
SKHVDSR

SEQ ID NO: 197401 - protein, 7 aa, synthetic construct
TGRVHMS

SEQ ID NO: 197402 - protein, 7 aa, synthetic construct
ISRSDSR

SEQ ID NO: 197403 - protein, 7 aa, synthetic construct
QRNVDSR

SEQ ID NO: 197404 - protein, 7 aa, synthetic construct
TGRSEQR

SEQ ID NO: 197405 - protein, 7 aa, synthetic construct
TDRASSR

SEQ ID NO: 197406 - protein, 7 aa, synthetic construct
TIEVKSR

SEQ ID NO: 197407 - protein, 7 aa, synthetic construct
TGRKDNS

SEQ ID NO: 197408 - protein, 7 aa, synthetic construct
MRNVDSR

SEQ ID NO: 197409 - protein, 7 aa, synthetic construct
TGRLDKA

SEQ ID NO: 197410 - protein, 7 aa, synthetic construct
TDRVAIR

SEQ ID NO: 197411 - protein, 7 aa, synthetic construct
TGQVERR

SEQ ID NO: 197412 - protein, 7 aa, synthetic construct
TGHVTAR

SEQ ID NO: 197413 - protein, 7 aa, synthetic construct
IGRVQSQ

SEQ ID NO: 197414 - protein, 7 aa, synthetic construct
TGRSHSP

SEQ ID NO: 197415 - protein, 7 aa, synthetic construct
TGRVKEV

SEQ ID NO: 197416 - protein, 7 aa, synthetic construct
FGRVTSP

SEQ ID NO: 197417 - protein, 7 aa, synthetic construct
MGRVDTK

SEQ ID NO: 197418 - protein, 7 aa, synthetic construct
TGRVQRD

SEQ ID NO: 197419 - protein, 7 aa, synthetic construct
TGEVMKR

SEQ ID NO: 197420 - protein, 7 aa, synthetic construct
TGRVHAS

SEQ ID NO: 197421 - protein, 7 aa, synthetic construct
VPRQDSR

SEQ ID NO: 197422 - protein, 7 aa, synthetic construct
MDRVNSR

SEQ ID NO: 197423 - protein, 7 aa, synthetic construct
TARVDKF

SEQ ID NO: 197424 - protein, 7 aa, synthetic construct
TGNKDVR

SEQ ID NO: 197425 - protein, 7 aa, synthetic construct
MIRNDSR

SEQ ID NO: 197426 - protein, 7 aa, synthetic construct
MGRVDNR

SEQ ID NO: 197427 - protein, 7 aa, synthetic construct
VGRVGDR

SEQ ID NO: 197428 - protein, 7 aa, synthetic construct
TDRPGSR

SEQ ID NO: 197429 - protein, 7 aa, synthetic construct
MGRVDKT

SEQ ID NO: 197430 - protein, 7 aa, synthetic construct
VGRVGSN

SEQ ID NO: 197431 - protein, 7 aa, synthetic construct
TERINSR

SEQ ID NO: 197432 - protein, 7 aa, synthetic construct
AGRVNDR

SEQ ID NO: 197433 - protein, 7 aa, synthetic construct
TGRVHSV

SEQ ID NO: 197434 - protein, 7 aa, synthetic construct
TKFVDTR

SEQ ID NO: 197435 - protein, 7 aa, synthetic construct
TVRVADR

SEQ ID NO: 197436 - protein, 7 aa, synthetic construct
TKRVDQT

SEQ ID NO: 197437 - protein, 7 aa, synthetic construct
TGRVNER

SEQ ID NO: 197438 - protein, 7 aa, synthetic construct
TMKVDHR

SEQ ID NO: 197439 - protein, 7 aa, synthetic construct
TGRVEKA

SEQ ID NO: 197440 - protein, 7 aa, synthetic construct
MDRVGSR

SEQ ID NO: 197441 - protein, 7 aa, synthetic construct
IGRVQDR

SEQ ID NO: 197442 - protein, 7 aa, synthetic construct
VRQVDSR

SEQ ID NO: 197443 - protein, 7 aa, synthetic construct
IGRVSSM

SEQ ID NO: 197444 - protein, 7 aa, synthetic construct
TGAHGSR

SEQ ID NO: 197445 - protein, 7 aa, synthetic construct
TGRHQSA

SEQ ID NO: 197446 - protein, 7 aa, synthetic construct
TQRVDKL

SEQ ID NO: 197447 - protein, 7 aa, synthetic construct
FGPKDSR

SEQ ID NO: 197448 - protein, 7 aa, synthetic construct
TKRVDVV

SEQ ID NO: 197449 - protein, 7 aa, synthetic construct
LGRVSSA

SEQ ID NO: 197450 - protein, 7 aa, synthetic construct
TKRVDGL

SEQ ID NO: 197451 - protein, 7 aa, synthetic construct
HGPVGSR

SEQ ID NO: 197452 - protein, 7 aa, synthetic construct
DGRVKSA

SEQ ID NO: 197453 - protein, 7 aa, synthetic construct
TNKSDSR

SEQ ID NO: 197454 - protein, 7 aa, synthetic construct
TGRTDKP

SEQ ID NO: 197455 - protein, 7 aa, synthetic construct
TGRVHVQ

SEQ ID NO: 197456 - protein, 7 aa, synthetic construct
VVRTDSR

SEQ ID NO: 197457 - protein, 7 aa, synthetic construct
TMRKDSV

SEQ ID NO: 197458 - protein, 7 aa, synthetic construct
TGRVDGK

SEQ ID NO: 197459 - protein, 7 aa, synthetic construct
YRSVDSR

SEQ ID NO: 197460 - protein, 7 aa, synthetic construct
FNKVDSR

SEQ ID NO: 197461 - protein, 7 aa, synthetic construct
TGRVERS

SEQ ID NO: 197462 - protein, 7 aa, synthetic construct
KGAVDAR

SEQ ID NO: 197463 - protein, 7 aa, synthetic construct
IGRVDRS

SEQ ID NO: 197464 - protein, 7 aa, synthetic construct
IGRTDVR

SEQ ID NO: 197465 - protein, 7 aa, synthetic construct
TNRELSR

SEQ ID NO: 197466 - protein, 7 aa, synthetic construct
TGRTHSM

SEQ ID NO: 197467 - protein, 7 aa, synthetic construct
TGRDKST

SEQ ID NO: 197468 - protein, 7 aa, synthetic construct
KGRQDSG

SEQ ID NO: 197469 - protein, 7 aa, synthetic construct
TGEVRNR

SEQ ID NO: 197470 - protein, 7 aa, synthetic construct
KGRVESG

SEQ ID NO: 197471 - protein, 7 aa, synthetic construct
AGRVDKF

SEQ ID NO: 197472 - protein, 7 aa, synthetic construct
TNRVKSD

SEQ ID NO: 197473 - protein, 7 aa, synthetic construct
KQRVDSN

SEQ ID NO: 197474 - protein, 7 aa, synthetic construct
KGIVDAR

SEQ ID NO: 197475 - protein, 7 aa, synthetic construct
TGNVDRK

SEQ ID NO: 197476 - protein, 7 aa, synthetic construct
TERITSR

SEQ ID NO: 197477 - protein, 7 aa, synthetic construct
LGKVDIR

SEQ ID NO: 197478 - protein, 7 aa, synthetic construct
IGRVASH

SEQ ID NO: 197479 - protein, 7 aa, synthetic construct
TGRVQDK

SEQ ID NO: 197480 - protein, 7 aa, synthetic construct
IGREDKR

SEQ ID NO: 197481 - protein, 7 aa, synthetic construct
YGRVTDR

SEQ ID NO: 197482 - protein, 7 aa, synthetic construct
TMRKDDR

SEQ ID NO: 197483 - protein, 7 aa, synthetic construct
TGRGTSN

SEQ ID NO: 197484 - protein, 7 aa, synthetic construct
TMRKDSS

SEQ ID NO: 197485 - protein, 7 aa, synthetic construct
TARVDKY

SEQ ID NO: 197486 - protein, 7 aa, synthetic construct
MGRVDSK

SEQ ID NO: 197487 - protein, 7 aa, synthetic construct
TGRVSQL

SEQ ID NO: 197488 - protein, 7 aa, synthetic construct
TKRVDTG

SEQ ID NO: 197489 - protein, 7 aa, synthetic construct
TGRHTSS

SEQ ID NO: 197490 - protein, 7 aa, synthetic construct
TDRGPSR

SEQ ID NO: 197491 - protein, 7 aa, synthetic construct
TGRVERV

SEQ ID NO: 197492 - protein, 7 aa, synthetic construct
QGRKDSG

SEQ ID NO: 197493 - protein, 7 aa, synthetic construct
TGRQTDR

SEQ ID NO: 197494 - protein, 7 aa, synthetic construct
QGRVGDR

SEQ ID NO: 197495 - protein, 7 aa, synthetic construct
KARVDSS

SEQ ID NO: 197496 - protein, 7 aa, synthetic construct
KGRDDTR

SEQ ID NO: 197497 - protein, 7 aa, synthetic construct
LQRVESR

SEQ ID NO: 197498 - protein, 7 aa, synthetic construct
TGRVRES

SEQ ID NO: 197499 - protein, 7 aa, synthetic construct
TAREVSR

SEQ ID NO: 197500 - protein, 7 aa, synthetic construct
TGTKDNR

SEQ ID NO: 197501 - protein, 7 aa, synthetic construct
PGGKDSR

SEQ ID NO: 197502 - protein, 7 aa, synthetic construct
TNNKDSR

SEQ ID NO: 197503 - protein, 7 aa, synthetic construct
MGRVTSL

SEQ ID NO: 197504 - protein, 7 aa, synthetic construct
TGRTADR

SEQ ID NO: 197505 - protein, 7 aa, synthetic construct
IGRVMSN

SEQ ID NO: 197506 - protein, 7 aa, synthetic construct
MGRNDVR

SEQ ID NO: 197507 - protein, 7 aa, synthetic construct
PDRVNSR

SEQ ID NO: 197508 - protein, 7 aa, synthetic construct
TSRVGER

SEQ ID NO: 197509 - protein, 7 aa, synthetic construct
TRSSDSR

SEQ ID NO: 197510 - protein, 7 aa, synthetic construct
SGRVKSE

SEQ ID NO: 197511 - protein, 7 aa, synthetic construct
TGRPDNK

SEQ ID NO: 197512 - protein, 7 aa, synthetic construct
FKREDSR

SEQ ID NO: 197513 - protein, 7 aa, synthetic construct
TSRVTER

SEQ ID NO: 197514 - protein, 7 aa, synthetic construct
TLRQDSK

SEQ ID NO: 197515 - protein, 7 aa, synthetic construct
KGAADSR

SEQ ID NO: 197516 - protein, 7 aa, synthetic construct
GGRGDIR

SEQ ID NO: 197517 - protein, 7 aa, synthetic construct
FPKVDSR

SEQ ID NO: 197518 - protein, 7 aa, synthetic construct
TDRSASR

SEQ ID NO: 197519 - protein, 7 aa, synthetic construct
TKRVDSI

SEQ ID NO: 197520 - protein, 7 aa, synthetic construct
KDRVDSR

SEQ ID NO: 197521 - protein, 7 aa, synthetic construct
TGRVNAN

SEQ ID NO: 197522 - protein, 7 aa, synthetic construct
TVGVDRR

SEQ ID NO: 197523 - protein, 7 aa, synthetic construct
TNRVNDR

SEQ ID NO: 197524 - protein, 7 aa, synthetic construct
FNRVESR

SEQ ID NO: 197525 - protein, 7 aa, synthetic construct
KGRMDSG

SEQ ID NO: 197526 - protein, 7 aa, synthetic construct
LGRVNSN

SEQ ID NO: 197527 - protein, 7 aa, synthetic construct
TDQVKSR

SEQ ID NO: 197528 - protein, 7 aa, synthetic construct
TGDVQKR

SEQ ID NO: 197529 - protein, 7 aa, synthetic construct
FPRTDSR

SEQ ID NO: 197530 - protein, 7 aa, synthetic construct
QGRVSSM

SEQ ID NO: 197531 - protein, 7 aa, synthetic construct
TGRQDNK

SEQ ID NO: 197532 - protein, 7 aa, synthetic construct
TRGGDSR

SEQ ID NO: 197533 - protein, 7 aa, synthetic construct
TGRAENR

SEQ ID NO: 197534 - protein, 7 aa, synthetic construct
TMNVDKR

SEQ ID NO: 197535 - protein, 7 aa, synthetic construct
TGRNDGK

SEQ ID NO: 197536 - protein, 7 aa, synthetic construct
TGKQDGR

SEQ ID NO: 197537 - protein, 7 aa, synthetic construct
IGRVLSN

SEQ ID NO: 197538 - protein, 7 aa, synthetic construct
TGREASR

SEQ ID NO: 197539 - protein, 7 aa, synthetic construct
GGRVDNR

SEQ ID NO: 197540 - protein, 7 aa, synthetic construct
LGRVHSV

SEQ ID NO: 197541 - protein, 7 aa, synthetic construct
YARVDTR

SEQ ID NO: 197542 - protein, 7 aa, synthetic construct
RGAVESR

SEQ ID NO: 197543 - protein, 7 aa, synthetic construct
TEPVKSR

SEQ ID NO: 197544 - protein, 7 aa, synthetic construct
NDRVVSR

SEQ ID NO: 197545 - protein, 7 aa, synthetic construct
TGRPDKM

SEQ ID NO: 197546 - protein, 7 aa, synthetic construct
TVDVRSR

SEQ ID NO: 197547 - protein, 7 aa, synthetic construct
KERQDSR

SEQ ID NO: 197548 - protein, 7 aa, synthetic construct
KTRVDSS

SEQ ID NO: 197549 - protein, 7 aa, synthetic construct
TGHVKDR

SEQ ID NO: 197550 - protein, 7 aa, synthetic construct
TGKSDAR

SEQ ID NO: 197551 - protein, 7 aa, synthetic construct
TSRSDSK

SEQ ID NO: 197552 - protein, 7 aa, synthetic construct
TRPVDAR

SEQ ID NO: 197553 - protein, 7 aa, synthetic construct
TGRVMHN

SEQ ID NO: 197554 - protein, 7 aa, synthetic construct
VGRDDKR

SEQ ID NO: 197555 - protein, 7 aa, synthetic construct
MNRVESR

SEQ ID NO: 197556 - protein, 7 aa, synthetic construct
TGDRVSR

SEQ ID NO: 197557 - protein, 7 aa, synthetic construct
TSRENSR

SEQ ID NO: 197558 - protein, 7 aa, synthetic construct
TKRGDSI

SEQ ID NO: 197559 - protein, 7 aa, synthetic construct
TGDVAKR

SEQ ID NO: 197560 - protein, 7 aa, synthetic construct
GGKVESR

SEQ ID NO: 197561 - protein, 7 aa, synthetic construct
TGRGDRA

SEQ ID NO: 197562 - protein, 7 aa, synthetic construct
TGKEFSR

SEQ ID NO: 197563 - protein, 7 aa, synthetic construct
VTRQDSR

SEQ ID NO: 197564 - protein, 7 aa, synthetic construct
GGRVDKM

SEQ ID NO: 197565 - protein, 7 aa, synthetic construct
QGRVTSQ

SEQ ID NO: 197566 - protein, 7 aa, synthetic construct
TGRKDTA

SEQ ID NO: 197567 - protein, 7 aa, synthetic construct
MGRGDSR

SEQ ID NO: 197568 - protein, 7 aa, synthetic construct
TGRTETR

SEQ ID NO: 197569 - protein, 7 aa, synthetic construct
TDRANSR

SEQ ID NO: 197570 - protein, 7 aa, synthetic construct
TGSRDSK

SEQ ID NO: 197571 - protein, 7 aa, synthetic construct
IRRVDSP

SEQ ID NO: 197572 - protein, 7 aa, synthetic construct
KGQVDAR

SEQ ID NO: 197573 - protein, 7 aa, synthetic construct
MGRVHSS

SEQ ID NO: 197574 - protein, 7 aa, synthetic construct
VGRVDAR

SEQ ID NO: 197575 - protein, 7 aa, synthetic construct
TGEVVRR

SEQ ID NO: 197576 - protein, 7 aa, synthetic construct
LGGVDKR

SEQ ID NO: 197577 - protein, 7 aa, synthetic construct
TGRLDKI

SEQ ID NO: 197578 - protein, 7 aa, synthetic construct
RGRVDQP

SEQ ID NO: 197579 - protein, 7 aa, synthetic construct
TTRVHSS

SEQ ID NO: 197580 - protein, 7 aa, synthetic construct
VKRVDSV

SEQ ID NO: 197581 - protein, 7 aa, synthetic construct
KDRQDSR

SEQ ID NO: 197582 - protein, 7 aa, synthetic construct
YGRAESR

SEQ ID NO: 197583 - protein, 7 aa, synthetic construct
VGKNDSR

SEQ ID NO: 197584 - protein, 7 aa, synthetic construct
TSPVDRR

SEQ ID NO: 197585 - protein, 7 aa, synthetic construct
QGKVDLR

SEQ ID NO: 197586 - protein, 7 aa, synthetic construct
TYKVDGR

SEQ ID NO: 197587 - protein, 7 aa, synthetic construct
GGRNDVR

SEQ ID NO: 197588 - protein, 7 aa, synthetic construct
TKRVDKE

SEQ ID NO: 197589 - protein, 7 aa, synthetic construct
YARVDSR

SEQ ID NO: 197590 - protein, 7 aa, synthetic construct
IGKADSR

SEQ ID NO: 197591 - protein, 7 aa, synthetic construct
MGRVADR

SEQ ID NO: 197592 - protein, 7 aa, synthetic construct
KGRVDTN

SEQ ID NO: 197593 - protein, 7 aa, synthetic construct
TSRTDSR

SEQ ID NO: 197594 - protein, 7 aa, synthetic construct
QVRVDAR

SEQ ID NO: 197595 - protein, 7 aa, synthetic construct
KGRGDSI

SEQ ID NO: 197596 - protein, 7 aa, synthetic construct
KIRDDSR

SEQ ID NO: 197597 - protein, 7 aa, synthetic construct
TGRQHSS

SEQ ID NO: 197598 - protein, 7 aa, synthetic construct
TGKVDAR

SEQ ID NO: 197599 - protein, 7 aa, synthetic construct
TGKIDGR

SEQ ID NO: 197600 - protein, 7 aa, synthetic construct
TYGKDSR

SEQ ID NO: 197601 - protein, 7 aa, synthetic construct
TGRNNER

SEQ ID NO: 197602 - protein, 7 aa, synthetic construct
TGRVHVA

SEQ ID NO: 197603 - protein, 7 aa, synthetic construct
TGRPSST

SEQ ID NO: 197604 - protein, 7 aa, synthetic construct
THSVSSR

SEQ ID NO: 197605 - protein, 7 aa, synthetic construct
TSRQDGR

SEQ ID NO: 197606 - protein, 7 aa, synthetic construct
TDRVKSY

SEQ ID NO: 197607 - protein, 7 aa, synthetic construct
MGRTDPR

SEQ ID NO: 197608 - protein, 7 aa, synthetic construct
TTRKDSI

SEQ ID NO: 197609 - protein, 7 aa, synthetic construct
VGRVASL

SEQ ID NO: 197610 - protein, 7 aa, synthetic construct
TDRPNSR

SEQ ID NO: 197611 - protein, 7 aa, synthetic construct
HPRVDNR

SEQ ID NO: 197612 - protein, 7 aa, synthetic construct
TSRSDLR

SEQ ID NO: 197613 - protein, 7 aa, synthetic construct
TKIHDSR

SEQ ID NO: 197614 - protein, 7 aa, synthetic construct
TGRVMEK

SEQ ID NO: 197615 - protein, 7 aa, synthetic construct
FGRVISP

SEQ ID NO: 197616 - protein, 7 aa, synthetic construct
TGRKDLN

SEQ ID NO: 197617 - protein, 7 aa, synthetic construct
EKRVDGR

SEQ ID NO: 197618 - protein, 7 aa, synthetic construct
TVRADSR

SEQ ID NO: 197619 - protein, 7 aa, synthetic construct
SGRVDKM

SEQ ID NO: 197620 - protein, 7 aa, synthetic construct
TGREGSK

SEQ ID NO: 197621 - protein, 7 aa, synthetic construct
TVRQDSR

SEQ ID NO: 197622 - protein, 7 aa, synthetic construct
TERTQSR

SEQ ID NO: 197623 - protein, 7 aa, synthetic construct
VGRVQSL

SEQ ID NO: 197624 - protein, 7 aa, synthetic construct
TGRGADR

SEQ ID NO: 197625 - protein, 7 aa, synthetic construct
VGRVHSI

SEQ ID NO: 197626 - protein, 7 aa, synthetic construct
TERVPPR

SEQ ID NO: 197627 - protein, 7 aa, synthetic construct
VGRVDPR

SEQ ID NO: 197628 - protein, 7 aa, synthetic construct
TRTNDSR

SEQ ID NO: 197629 - protein, 7 aa, synthetic construct
IGRVDGR

SEQ ID NO: 197630 - protein, 7 aa, synthetic construct
TGGKESR

SEQ ID NO: 197631 - protein, 7 aa, synthetic construct
TSRVSSQ

SEQ ID NO: 197632 - protein, 7 aa, synthetic construct
TENVRSR

SEQ ID NO: 197633 - protein, 7 aa, synthetic construct
KQRVDST

SEQ ID NO: 197634 - protein, 7 aa, synthetic construct
TDRTLSR

SEQ ID NO: 197635 - protein, 7 aa, synthetic construct
FTRVDSK

SEQ ID NO: 197636 - protein, 7 aa, synthetic construct
TSRVDLR

SEQ ID NO: 197637 - protein, 7 aa, synthetic construct
IGRQDAR

SEQ ID NO: 197638 - protein, 7 aa, synthetic construct
TTRVEGR

SEQ ID NO: 197639 - protein, 7 aa, synthetic construct
QGRTDAR

SEQ ID NO: 197640 - protein, 7 aa, synthetic construct
IQRSDSR

SEQ ID NO: 197641 - protein, 7 aa, synthetic construct
MDRVDKR

SEQ ID NO: 197642 - protein, 7 aa, synthetic construct
TERVPSK

SEQ ID NO: 197643 - protein, 7 aa, synthetic construct
TGRTSER

SEQ ID NO: 197644 - protein, 7 aa, synthetic construct
TGRADKN

SEQ ID NO: 197645 - protein, 7 aa, synthetic construct
TGRVHPI

SEQ ID NO: 197646 - protein, 7 aa, synthetic construct
MGKIDSR

SEQ ID NO: 197647 - protein, 7 aa, synthetic construct
TVRVQER

SEQ ID NO: 197648 - protein, 7 aa, synthetic construct
TKGQDSR

SEQ ID NO: 197649 - protein, 7 aa, synthetic construct
TGRNQSG

SEQ ID NO: 197650 - protein, 7 aa, synthetic construct
VGDVRSR

SEQ ID NO: 197651 - protein, 7 aa, synthetic construct
TGRHISG

SEQ ID NO: 197652 - protein, 7 aa, synthetic construct
QKRVDST

SEQ ID NO: 197653 - protein, 7 aa, synthetic construct
TGRTEVR

SEQ ID NO: 197654 - protein, 7 aa, synthetic construct
TGRNTSG

SEQ ID NO: 197655 - protein, 7 aa, synthetic construct
TSRVSER

SEQ ID NO: 197656 - protein, 7 aa, synthetic construct
TGRNISV

SEQ ID NO: 197657 - protein, 7 aa, synthetic construct
TGRTDSK

SEQ ID NO: 197658 - protein, 7 aa, synthetic construct
TGRPMDR

SEQ ID NO: 197659 - protein, 7 aa, synthetic construct
SGRVHSG

SEQ ID NO: 197660 - protein, 7 aa, synthetic construct
SSRVESR

SEQ ID NO: 197661 - protein, 7 aa, synthetic construct
TGRNMSA

SEQ ID NO: 197662 - protein, 7 aa, synthetic construct
KGAIDSR

SEQ ID NO: 197663 - protein, 7 aa, synthetic construct
SGRVISN

SEQ ID NO: 197664 - protein, 7 aa, synthetic construct
TVRTDNR

SEQ ID NO: 197665 - protein, 7 aa, synthetic construct
MGRVEVR

SEQ ID NO: 197666 - protein, 7 aa, synthetic construct
IGRVKSD

SEQ ID NO: 197667 - protein, 7 aa, synthetic construct
KGGPDSR

SEQ ID NO: 197668 - protein, 7 aa, synthetic construct
TLREDKR

SEQ ID NO: 197669 - protein, 7 aa, synthetic construct
KARVDSL

SEQ ID NO: 197670 - protein, 7 aa, synthetic construct
WPKVDSR

SEQ ID NO: 197671 - protein, 7 aa, synthetic construct
IGRVNSA

SEQ ID NO: 197672 - protein, 7 aa, synthetic construct
TTRNDAR

SEQ ID NO: 197673 - protein, 7 aa, synthetic construct
MGRVELR

SEQ ID NO: 197674 - protein, 7 aa, synthetic construct
HKNVDSR

SEQ ID NO: 197675 - protein, 7 aa, synthetic construct
TMRVTER

SEQ ID NO: 197676 - protein, 7 aa, synthetic construct
TGRVSNI

SEQ ID NO: 197677 - protein, 7 aa, synthetic construct
KSRVDSM

SEQ ID NO: 197678 - protein, 7 aa, synthetic construct
TNRIDSK

SEQ ID NO: 197679 - protein, 7 aa, synthetic construct
TGAKDYR

SEQ ID NO: 197680 - protein, 7 aa, synthetic construct
TGRAHSI

SEQ ID NO: 197681 - protein, 7 aa, synthetic construct
SSRADSR

SEQ ID NO: 197682 - protein, 7 aa, synthetic construct
TNRVSSN

SEQ ID NO: 197683 - protein, 7 aa, synthetic construct
SGRKDSP

SEQ ID NO: 197684 - protein, 7 aa, synthetic construct
IGRVMSS

SEQ ID NO: 197685 - protein, 7 aa, synthetic construct
VGRGDNR

SEQ ID NO: 197686 - protein, 7 aa, synthetic construct
TNRVESR

SEQ ID NO: 197687 - protein, 7 aa, synthetic construct
TLRAESR

SEQ ID NO: 197688 - protein, 7 aa, synthetic construct
QGRVSER

SEQ ID NO: 197689 - protein, 7 aa, synthetic construct
TKREDYR

SEQ ID NO: 197690 - protein, 7 aa, synthetic construct
AKRVDST

SEQ ID NO: 197691 - protein, 7 aa, synthetic construct
TQRGESR

SEQ ID NO: 197692 - protein, 7 aa, synthetic construct
TGAVHPR

SEQ ID NO: 197693 - protein, 7 aa, synthetic construct
TERQVSR

SEQ ID NO: 197694 - protein, 7 aa, synthetic construct
TNRTDLR

SEQ ID NO: 197695 - protein, 7 aa, synthetic construct
TKHVDAR

SEQ ID NO: 197696 - protein, 7 aa, synthetic construct
LGRVVDR

SEQ ID NO: 197697 - protein, 7 aa, synthetic construct
GGRVSDR

SEQ ID NO: 197698 - protein, 7 aa, synthetic construct
TGRVHNI

SEQ ID NO: 197699 - protein, 7 aa, synthetic construct
TGNLDKR

SEQ ID NO: 197700 - protein, 7 aa, synthetic construct
TSRQDSK

SEQ ID NO: 197701 - protein, 7 aa, synthetic construct
VGRDTSR

SEQ ID NO: 197702 - protein, 7 aa, synthetic construct
LGRQDIR

SEQ ID NO: 197703 - protein, 7 aa, synthetic construct
TSRVQDR

SEQ ID NO: 197704 - protein, 7 aa, synthetic construct
MGRQESR

SEQ ID NO: 197705 - protein, 7 aa, synthetic construct
AGDVKSR

SEQ ID NO: 197706 - protein, 7 aa, synthetic construct
TPHVNSR

SEQ ID NO: 197707 - protein, 7 aa, synthetic construct
TARVENR

SEQ ID NO: 197708 - protein, 7 aa, synthetic construct
TKYVESR

SEQ ID NO: 197709 - protein, 7 aa, synthetic construct
TFKGDSR

SEQ ID NO: 197710 - protein, 7 aa, synthetic construct
YGAVDKR

SEQ ID NO: 197711 - protein, 7 aa, synthetic construct
KGRTDSM

SEQ ID NO: 197712 - protein, 7 aa, synthetic construct
TGRQPDR

SEQ ID NO: 197713 - protein, 7 aa, synthetic construct
KGRVESV

SEQ ID NO: 197714 - protein, 7 aa, synthetic construct
MARVDNR

SEQ ID NO: 197715 - protein, 7 aa, synthetic construct
LGRTDVR

SEQ ID NO: 197716 - protein, 7 aa, synthetic construct
TGRVSAA

SEQ ID NO: 197717 - protein, 7 aa, synthetic construct
TKHQDSR

SEQ ID NO: 197718 - protein, 7 aa, synthetic construct
YGRVDTR

SEQ ID NO: 197719 - protein, 7 aa, synthetic construct
QGKVDYR

SEQ ID NO: 197720 - protein, 7 aa, synthetic construct
VGRVDKI

SEQ ID NO: 197721 - protein, 7 aa, synthetic construct
PDRVPSR

SEQ ID NO: 197722 - protein, 7 aa, synthetic construct
KQRVDSV

SEQ ID NO: 197723 - protein, 7 aa, synthetic construct
SGRVVDR

SEQ ID NO: 197724 - protein, 7 aa, synthetic construct
FGKVDTR

SEQ ID NO: 197725 - protein, 7 aa, synthetic construct
TDRQLSR

SEQ ID NO: 197726 - protein, 7 aa, synthetic construct
TARNDGR

SEQ ID NO: 197727 - protein, 7 aa, synthetic construct
NERVASR

SEQ ID NO: 197728 - protein, 7 aa, synthetic construct
TGRSTSN

SEQ ID NO: 197729 - protein, 7 aa, synthetic construct
TGRGTSS

SEQ ID NO: 197730 - protein, 7 aa, synthetic construct
QGRVDKL

SEQ ID NO: 197731 - protein, 7 aa, synthetic construct
QGRVHSV

SEQ ID NO: 197732 - protein, 7 aa, synthetic construct
TKMTDSR

SEQ ID NO: 197733 - protein, 7 aa, synthetic construct
MGRQDTR

SEQ ID NO: 197734 - protein, 7 aa, synthetic construct
TFKVESR

SEQ ID NO: 197735 - protein, 7 aa, synthetic construct
VGRVISG

SEQ ID NO: 197736 - protein, 7 aa, synthetic construct
KGQVESR

SEQ ID NO: 197737 - protein, 7 aa, synthetic construct
MGRVDQK

SEQ ID NO: 197738 - protein, 7 aa, synthetic construct
QSRVDAR

SEQ ID NO: 197739 - protein, 7 aa, synthetic construct
AGRNDTR

SEQ ID NO: 197740 - protein, 7 aa, synthetic construct
TGRVHAA

SEQ ID NO: 197741 - protein, 7 aa, synthetic construct
VGRVHSA

SEQ ID NO: 197742 - protein, 7 aa, synthetic construct
TGRVNSN

SEQ ID NO: 197743 - protein, 7 aa, synthetic construct
TDRAPSR

SEQ ID NO: 197744 - protein, 7 aa, synthetic construct
TGRQDKQ

SEQ ID NO: 197745 - protein, 7 aa, synthetic construct
IGRTDGR

SEQ ID NO: 197746 - protein, 7 aa, synthetic construct
KGREDTR

SEQ ID NO: 197747 - protein, 7 aa, synthetic construct
TGRVTHV

SEQ ID NO: 197748 - protein, 7 aa, synthetic construct
TGRTSSA

SEQ ID NO: 197749 - protein, 7 aa, synthetic construct
TGRNTSM

SEQ ID NO: 197750 - protein, 7 aa, synthetic construct
TGRKDAV

SEQ ID NO: 197751 - protein, 7 aa, synthetic construct
TGHVTPR

SEQ ID NO: 197752 - protein, 7 aa, synthetic construct
LGRVHSI

SEQ ID NO: 197753 - protein, 7 aa, synthetic construct
IRQVDSR

SEQ ID NO: 197754 - protein, 7 aa, synthetic construct
RVPVDSR

SEQ ID NO: 197755 - protein, 7 aa, synthetic construct
YGRIDSK

SEQ ID NO: 197756 - protein, 7 aa, synthetic construct
KNRVDSS

SEQ ID NO: 197757 - protein, 7 aa, synthetic construct
TGRVDRA

SEQ ID NO: 197758 - protein, 7 aa, synthetic construct
KMRVDSI

SEQ ID NO: 197759 - protein, 7 aa, synthetic construct
TTRVNDR

SEQ ID NO: 197760 - protein, 7 aa, synthetic construct
TGRKEST

SEQ ID NO: 197761 - protein, 7 aa, synthetic construct
TNRKDSA

SEQ ID NO: 197762 - protein, 7 aa, synthetic construct
TGRPDKL

SEQ ID NO: 197763 - protein, 7 aa, synthetic construct
TGHISSR

SEQ ID NO: 197764 - protein, 7 aa, synthetic construct
YGRVNSG

SEQ ID NO: 197765 - protein, 7 aa, synthetic construct
IGEVRSR

SEQ ID NO: 197766 - protein, 7 aa, synthetic construct
KFRVDSP

SEQ ID NO: 197767 - protein, 7 aa, synthetic construct
KGRVDTM

SEQ ID NO: 197768 - protein, 7 aa, synthetic construct
TSRNDQR

SEQ ID NO: 197769 - protein, 7 aa, synthetic construct
TGRPDRQ

SEQ ID NO: 197770 - protein, 7 aa, synthetic construct
TVRNDSK

SEQ ID NO: 197771 - protein, 7 aa, synthetic construct
TNKVDSR

SEQ ID NO: 197772 - protein, 7 aa, synthetic construct
TGPQDRR

SEQ ID NO: 197773 - protein, 7 aa, synthetic construct
IGRVHSG

SEQ ID NO: 197774 - protein, 7 aa, synthetic construct
TGRGDMK

SEQ ID NO: 197775 - protein, 7 aa, synthetic construct
KGRDDVR

SEQ ID NO: 197776 - protein, 7 aa, synthetic construct
QGKADSR

SEQ ID NO: 197777 - protein, 7 aa, synthetic construct
QDRVSSR

SEQ ID NO: 197778 - protein, 7 aa, synthetic construct
LGRVEVR

SEQ ID NO: 197779 - protein, 7 aa, synthetic construct
TNRKDSI

SEQ ID NO: 197780 - protein, 7 aa, synthetic construct
QGRVPER

SEQ ID NO: 197781 - protein, 7 aa, synthetic construct
QGRIDVR

SEQ ID NO: 197782 - protein, 7 aa, synthetic construct
TGRVSLS

SEQ ID NO: 197783 - protein, 7 aa, synthetic construct
LGRVGSG

SEQ ID NO: 197784 - protein, 7 aa, synthetic construct
TKSFDSR

SEQ ID NO: 197785 - protein, 7 aa, synthetic construct
KGRVDLA

SEQ ID NO: 197786 - protein, 7 aa, synthetic construct
TGRVKFD

SEQ ID NO: 197787 - protein, 7 aa, synthetic construct
VGRVMSV

SEQ ID NO: 197788 - protein, 7 aa, synthetic construct
TGRGEVR

SEQ ID NO: 197789 - protein, 7 aa, synthetic construct
TGKVQDR

SEQ ID NO: 197790 - protein, 7 aa, synthetic construct
FGARDSR

SEQ ID NO: 197791 - protein, 7 aa, synthetic construct
QGRVKSD

SEQ ID NO: 197792 - protein, 7 aa, synthetic construct
TVRTESR

SEQ ID NO: 197793 - protein, 7 aa, synthetic construct
IGRTDPR

SEQ ID NO: 197794 - protein, 7 aa, synthetic construct
IGRVVDR

SEQ ID NO: 197795 - protein, 7 aa, synthetic construct
DGKVPSR

SEQ ID NO: 197796 - protein, 7 aa, synthetic construct
LGRVISG

SEQ ID NO: 197797 - protein, 7 aa, synthetic construct
KGAQDSR

SEQ ID NO: 197798 - protein, 7 aa, synthetic construct
IGRVKSE

SEQ ID NO: 197799 - protein, 7 aa, synthetic construct
TGDVRPR

SEQ ID NO: 197800 - protein, 7 aa, synthetic construct
THKADSR

SEQ ID NO: 197801 - protein, 7 aa, synthetic construct
TIRETSR

SEQ ID NO: 197802 - protein, 7 aa, synthetic construct
KGREDPR

SEQ ID NO: 197803 - protein, 7 aa, synthetic construct
TNREDKR

SEQ ID NO: 197804 - protein, 7 aa, synthetic construct
TGRNDKS

SEQ ID NO: 197805 - protein, 7 aa, synthetic construct
ATRADSR

SEQ ID NO: 197806 - protein, 7 aa, synthetic construct
TNRVLER

SEQ ID NO: 197807 - protein, 7 aa, synthetic construct
TGRELSK

SEQ ID NO: 197808 - protein, 7 aa, synthetic construct
TVRKDSF

SEQ ID NO: 197809 - protein, 7 aa, synthetic construct
TFKQDSR

SEQ ID NO: 197810 - protein, 7 aa, synthetic construct
TVRVDRG

SEQ ID NO: 197811 - protein, 7 aa, synthetic construct
TKRVEST

SEQ ID NO: 197812 - protein, 7 aa, synthetic construct
TGRNQDR

SEQ ID NO: 197813 - protein, 7 aa, synthetic construct
LGRVHST

SEQ ID NO: 197814 - protein, 7 aa, synthetic construct
TRQADSR

SEQ ID NO: 197815 - protein, 7 aa, synthetic construct
QPRVESR

SEQ ID NO: 197816 - protein, 7 aa, synthetic construct
GKMVDSR

SEQ ID NO: 197817 - protein, 7 aa, synthetic construct
QTRPDSR

SEQ ID NO: 197818 - protein, 7 aa, synthetic construct
IGRVHSS

SEQ ID NO: 197819 - protein, 7 aa, synthetic construct
TDRVPSR

SEQ ID NO: 197820 - protein, 7 aa, synthetic construct
TQRKDSN

SEQ ID NO: 197821 - protein, 7 aa, synthetic construct
MTRVDTR

SEQ ID NO: 197822 - protein, 7 aa, synthetic construct
TGRGTDR

SEQ ID NO: 197823 - protein, 7 aa, synthetic construct
YGKVDSR

SEQ ID NO: 197824 - protein, 7 aa, synthetic construct
TDKVPSR

SEQ ID NO: 197825 - protein, 7 aa, synthetic construct
QGRVDQK

SEQ ID NO: 197826 - protein, 7 aa, synthetic construct
VGRGDPR

SEQ ID NO: 197827 - protein, 7 aa, synthetic construct
MGRVGDR

SEQ ID NO: 197828 - protein, 7 aa, synthetic construct
TSRVDKI

SEQ ID NO: 197829 - protein, 7 aa, synthetic construct
TGSAHSR

SEQ ID NO: 197830 - protein, 7 aa, synthetic construct
KNRDDSR

SEQ ID NO: 197831 - protein, 7 aa, synthetic construct
TKRVASE

SEQ ID NO: 197832 - protein, 7 aa, synthetic construct
TGGVTHR

SEQ ID NO: 197833 - protein, 7 aa, synthetic construct
TGRNSSL

SEQ ID NO: 197834 - protein, 7 aa, synthetic construct
TTRQDNR

SEQ ID NO: 197835 - protein, 7 aa, synthetic construct
LGREGSR

SEQ ID NO: 197836 - protein, 7 aa, synthetic construct
TPRVEGR

SEQ ID NO: 197837 - protein, 7 aa, synthetic construct
SGRVNDR

SEQ ID NO: 197838 - protein, 7 aa, synthetic construct
TGGVDRR

SEQ ID NO: 197839 - protein, 7 aa, synthetic construct
TKSMDSR

SEQ ID NO: 197840 - protein, 7 aa, synthetic construct
LGRVQSQ

SEQ ID NO: 197841 - protein, 7 aa, synthetic construct
TGRVKDS

SEQ ID NO: 197842 - protein, 7 aa, synthetic construct
QGRVHSP

SEQ ID NO: 197843 - protein, 7 aa, synthetic construct
TTRQDGR

SEQ ID NO: 197844 - protein, 7 aa, synthetic construct
QGRVISQ

SEQ ID NO: 197845 - protein, 7 aa, synthetic construct
TERVQGR

SEQ ID NO: 197846 - protein, 7 aa, synthetic construct
LNRVDNR

SEQ ID NO: 197847 - protein, 7 aa, synthetic construct
TEIVKSR

SEQ ID NO: 197848 - protein, 7 aa, synthetic construct
TGRKDSP

SEQ ID NO: 197849 - protein, 7 aa, synthetic construct
KGRVDQN

SEQ ID NO: 197850 - protein, 7 aa, synthetic construct
ASRQDSR

SEQ ID NO: 197851 - protein, 7 aa, synthetic construct
RGPSDSR

SEQ ID NO: 197852 - protein, 7 aa, synthetic construct
TTRVESR

SEQ ID NO: 197853 - protein, 7 aa, synthetic construct
TSRTDNR

SEQ ID NO: 197854 - protein, 7 aa, synthetic construct
TLDVKSR

SEQ ID NO: 197855 - protein, 7 aa, synthetic construct
TGRVDRQ

SEQ ID NO: 197856 - protein, 7 aa, synthetic construct
TERVGIR

SEQ ID NO: 197857 - protein, 7 aa, synthetic construct
TGRGDRT

SEQ ID NO: 197858 - protein, 7 aa, synthetic construct
IGRVGSN

SEQ ID NO: 197859 - protein, 7 aa, synthetic construct
VSRNDSR

SEQ ID NO: 197860 - protein, 7 aa, synthetic construct
KGRVDTT

SEQ ID NO: 197861 - protein, 7 aa, synthetic construct
GVRADSR

SEQ ID NO: 197862 - protein, 7 aa, synthetic construct
TERVQVR

SEQ ID NO: 197863 - protein, 7 aa, synthetic construct
QTRVDVR

SEQ ID NO: 197864 - protein, 7 aa, synthetic construct
THRVTSQ

SEQ ID NO: 197865 - protein, 7 aa, synthetic construct
SGKQDSR

SEQ ID NO: 197866 - protein, 7 aa, synthetic construct
TRNVDPR

SEQ ID NO: 197867 - protein, 7 aa, synthetic construct
MGRVHSP

SEQ ID NO: 197868 - protein, 7 aa, synthetic construct
LGRTDSR

SEQ ID NO: 197869 - protein, 7 aa, synthetic construct
TGRESVR

SEQ ID NO: 197870 - protein, 7 aa, synthetic construct
MGRMDSK

SEQ ID NO: 197871 - protein, 7 aa, synthetic construct
TQRVMER

SEQ ID NO: 197872 - protein, 7 aa, synthetic construct
TVRVTDR

SEQ ID NO: 197873 - protein, 7 aa, synthetic construct
TGRVHGQ

SEQ ID NO: 197874 - protein, 7 aa, synthetic construct
TDRIQSR

SEQ ID NO: 197875 - protein, 7 aa, synthetic construct
TGRETSK

SEQ ID NO: 197876 - protein, 7 aa, synthetic construct
TGRVHST

SEQ ID NO: 197877 - protein, 7 aa, synthetic construct
LSRTDSR

SEQ ID NO: 197878 - protein, 7 aa, synthetic construct
TGREGPR

SEQ ID NO: 197879 - protein, 7 aa, synthetic construct
MVRVDNR

SEQ ID NO: 197880 - protein, 7 aa, synthetic construct
LGRNDSR

SEQ ID NO: 197881 - protein, 7 aa, synthetic construct
TFRNDSK

SEQ ID NO: 197882 - protein, 7 aa, synthetic construct
TGRTVER

SEQ ID NO: 197883 - protein, 7 aa, synthetic construct
RGSVDSK

SEQ ID NO: 197884 - protein, 7 aa, synthetic construct
TRNVDLR

SEQ ID NO: 197885 - protein, 7 aa, synthetic construct
TGRVTER

SEQ ID NO: 197886 - protein, 7 aa, synthetic construct
TGRVDKV

SEQ ID NO: 197887 - protein, 7 aa, synthetic construct
FKSVDSR

SEQ ID NO: 197888 - protein, 7 aa, synthetic construct
KLRDDSR

SEQ ID NO: 197889 - protein, 7 aa, synthetic construct
QSRVDPR

SEQ ID NO: 197890 - protein, 7 aa, synthetic construct
TGRNDGR

SEQ ID NO: 197891 - protein, 7 aa, synthetic construct
VGRSDGR

SEQ ID NO: 197892 - protein, 7 aa, synthetic construct
FVKVDSR

SEQ ID NO: 197893 - protein, 7 aa, synthetic construct
TGHPTSR

SEQ ID NO: 197894 - protein, 7 aa, synthetic construct
THKSDSR

SEQ ID NO: 197895 - protein, 7 aa, synthetic construct
VGKLDSR

SEQ ID NO: 197896 - protein, 7 aa, synthetic construct
IGRADPR

SEQ ID NO: 197897 - protein, 7 aa, synthetic construct
IGRVSSL

SEQ ID NO: 197898 - protein, 7 aa, synthetic construct
AGKVDAR

SEQ ID NO: 197899 - protein, 7 aa, synthetic construct
YTRVDSK

SEQ ID NO: 197900 - protein, 7 aa, synthetic construct
TERVNMR

SEQ ID NO: 197901 - protein, 7 aa, synthetic construct
MGRVDMK

SEQ ID NO: 197902 - protein, 7 aa, synthetic construct
TPRSDNR

SEQ ID NO: 197903 - protein, 7 aa, synthetic construct
RTTVDSR

SEQ ID NO: 197904 - protein, 7 aa, synthetic construct
VGRSDLR

SEQ ID NO: 197905 - protein, 7 aa, synthetic construct
IGRVQSA

SEQ ID NO: 197906 - protein, 7 aa, synthetic construct
TGRLKSD

SEQ ID NO: 197907 - protein, 7 aa, synthetic construct
TGRQDKG

SEQ ID NO: 197908 - protein, 7 aa, synthetic construct
KPRVDER

SEQ ID NO: 197909 - protein, 7 aa, synthetic construct
KGVQDSR

SEQ ID NO: 197910 - protein, 7 aa, synthetic construct
TGRVTAN

SEQ ID NO: 197911 - protein, 7 aa, synthetic construct
TFGKDSR

SEQ ID NO: 197912 - protein, 7 aa, synthetic construct
TGRKDLV

SEQ ID NO: 197913 - protein, 7 aa, synthetic construct
TSRVSSG

SEQ ID NO: 197914 - protein, 7 aa, synthetic construct
TGHVSPR

SEQ ID NO: 197915 - protein, 7 aa, synthetic construct
TTHVNSR

SEQ ID NO: 197916 - protein, 7 aa, synthetic construct
TQKHDSR

SEQ ID NO: 197917 - protein, 7 aa, synthetic construct
NRSVDSR

SEQ ID NO: 197918 - protein, 7 aa, synthetic construct
DGRVKSY

SEQ ID NO: 197919 - protein, 7 aa, synthetic construct
KGDVQSR

SEQ ID NO: 197920 - protein, 7 aa, synthetic construct
MKGVDSR

SEQ ID NO: 197921 - protein, 7 aa, synthetic construct
LGRVKSD

SEQ ID NO: 197922 - protein, 7 aa, synthetic construct
TGRVGEK

SEQ ID NO: 197923 - protein, 7 aa, synthetic construct
QVRSDSR

SEQ ID NO: 197924 - protein, 7 aa, synthetic construct
TGVKESR

SEQ ID NO: 197925 - protein, 7 aa, synthetic construct
TGKVDHK

SEQ ID NO: 197926 - protein, 7 aa, synthetic construct
TGRSIER

SEQ ID NO: 197927 - protein, 7 aa, synthetic construct
TRQVDSR

SEQ ID NO: 197928 - protein, 7 aa, synthetic construct
RGRTDSV

SEQ ID NO: 197929 - protein, 7 aa, synthetic construct
IGRIDSR

SEQ ID NO: 197930 - protein, 7 aa, synthetic construct
IPRVESR

SEQ ID NO: 197931 - protein, 7 aa, synthetic construct
IGKQDSR

SEQ ID NO: 197932 - protein, 7 aa, synthetic construct
TGRGDRG

SEQ ID NO: 197933 - protein, 7 aa, synthetic construct
TGRGDKQ

SEQ ID NO: 197934 - protein, 7 aa, synthetic construct
TGRINDR

SEQ ID NO: 197935 - protein, 7 aa, synthetic construct
QGKVDQR

SEQ ID NO: 197936 - protein, 7 aa, synthetic construct
KGRVDIA

SEQ ID NO: 197937 - protein, 7 aa, synthetic construct
KERGDSR

SEQ ID NO: 197938 - protein, 7 aa, synthetic construct
TGRVKID

SEQ ID NO: 197939 - protein, 7 aa, synthetic construct
TGRLDNK

SEQ ID NO: 197940 - protein, 7 aa, synthetic construct
TKRVDLM

SEQ ID NO: 197941 - protein, 7 aa, synthetic construct
GDRVVSR

SEQ ID NO: 197942 - protein, 7 aa, synthetic construct
TGRNASS

SEQ ID NO: 197943 - protein, 7 aa, synthetic construct
TERVPGR

SEQ ID NO: 197944 - protein, 7 aa, synthetic construct
KMRVDSA

SEQ ID NO: 197945 - protein, 7 aa, synthetic construct
MGRVISS

SEQ ID NO: 197946 - protein, 7 aa, synthetic construct
QKGVDSR

SEQ ID NO: 197947 - protein, 7 aa, synthetic construct
TSRVELR

SEQ ID NO: 197948 - protein, 7 aa, synthetic construct
TMRVSDR

SEQ ID NO: 197949 - protein, 7 aa, synthetic construct
IQRGDSR

SEQ ID NO: 197950 - protein, 7 aa, synthetic construct
IGNKDSR

SEQ ID NO: 197951 - protein, 7 aa, synthetic construct
TERLNSR

SEQ ID NO: 197952 - protein, 7 aa, synthetic construct
TGRSMDR

SEQ ID NO: 197953 - protein, 7 aa, synthetic construct
MPRVDSR

SEQ ID NO: 197954 - protein, 7 aa, synthetic construct
VVRADSR

SEQ ID NO: 197955 - protein, 7 aa, synthetic construct
QPRVDTR

SEQ ID NO: 197956 - protein, 7 aa, synthetic construct
TRTGDSR

SEQ ID NO: 197957 - protein, 7 aa, synthetic construct
LGRTDTR

SEQ ID NO: 197958 - protein, 7 aa, synthetic construct
TGYVKST

SEQ ID NO: 197959 - protein, 7 aa, synthetic construct
TGRGDKA

SEQ ID NO: 197960 - protein, 7 aa, synthetic construct
ANRVDPR

SEQ ID NO: 197961 - protein, 7 aa, synthetic construct
KGPVDHR

SEQ ID NO: 197962 - protein, 7 aa, synthetic construct
TGRVLRE

SEQ ID NO: 197963 - protein, 7 aa, synthetic construct
TMRSESR

SEQ ID NO: 197964 - protein, 7 aa, synthetic construct
VARNDSR

SEQ ID NO: 197965 - protein, 7 aa, synthetic construct
IGRVDKQ

SEQ ID NO: 197966 - protein, 7 aa, synthetic construct
YTRADSR

SEQ ID NO: 197967 - protein, 7 aa, synthetic construct
FKRVDSV

SEQ ID NO: 197968 - protein, 7 aa, synthetic construct
TGRSSSA

SEQ ID NO: 197969 - protein, 7 aa, synthetic construct
AGRADSK

SEQ ID NO: 197970 - protein, 7 aa, synthetic construct
TFRKDSG

SEQ ID NO: 197971 - protein, 7 aa, synthetic construct
TPREISR

SEQ ID NO: 197972 - protein, 7 aa, synthetic construct
VGRGDLR

SEQ ID NO: 197973 - protein, 7 aa, synthetic construct
MGRIDSR

SEQ ID NO: 197974 - protein, 7 aa, synthetic construct
TGRELGR

SEQ ID NO: 197975 - protein, 7 aa, synthetic construct
KGNVDNR

SEQ ID NO: 197976 - protein, 7 aa, synthetic construct
YGRNESR

SEQ ID NO: 197977 - protein, 7 aa, synthetic construct
NPRVDNR

SEQ ID NO: 197978 - protein, 7 aa, synthetic construct
THGVGSR

SEQ ID NO: 197979 - protein, 7 aa, synthetic construct
TSRVDKM

SEQ ID NO: 197980 - protein, 7 aa, synthetic construct
SNRVESR

SEQ ID NO: 197981 - protein, 7 aa, synthetic construct
TVRVESR

SEQ ID NO: 197982 - protein, 7 aa, synthetic construct
SGKNDSR

SEQ ID NO: 197983 - protein, 7 aa, synthetic construct
FSRVDGR

SEQ ID NO: 197984 - protein, 7 aa, synthetic construct
TAKFDSR

SEQ ID NO: 197985 - protein, 7 aa, synthetic construct
HKSVDSR

SEQ ID NO: 197986 - protein, 7 aa, synthetic construct
QGRIDQR

SEQ ID NO: 197987 - protein, 7 aa, synthetic construct
TGHVSVR

SEQ ID NO: 197988 - protein, 7 aa, synthetic construct
SRTVDSR

SEQ ID NO: 197989 - protein, 7 aa, synthetic construct
TGRGETR

SEQ ID NO: 197990 - protein, 7 aa, synthetic construct
TARVRSE

SEQ ID NO: 197991 - protein, 7 aa, synthetic construct
TGRPLER

SEQ ID NO: 197992 - protein, 7 aa, synthetic construct
AGRGDVR

SEQ ID NO: 197993 - protein, 7 aa, synthetic construct
KERVDAR

SEQ ID NO: 197994 - protein, 7 aa, synthetic construct
SGDVRSR

SEQ ID NO: 197995 - protein, 7 aa, synthetic construct
KNRVDSV

SEQ ID NO: 197996 - protein, 7 aa, synthetic construct
TARNDNR

SEQ ID NO: 197997 - protein, 7 aa, synthetic construct
VNRVDSK

SEQ ID NO: 197998 - protein, 7 aa, synthetic construct
QGRVISH

SEQ ID NO: 197999 - protein, 7 aa, synthetic construct
TERVGSR

SEQ ID NO: 198000 - protein, 7 aa, synthetic construct
SGRVASN

SEQ ID NO: 198001 - protein, 7 aa, synthetic construct
LGRKDSP

SEQ ID NO: 198002 - protein, 7 aa, synthetic construct
TGPGDRR

SEQ ID NO: 198003 - protein, 7 aa, synthetic construct
TDRVALR

SEQ ID NO: 198004 - protein, 7 aa, synthetic construct
IGRVQSN

SEQ ID NO: 198005 - protein, 7 aa, synthetic construct
TGRDTNR

SEQ ID NO: 198006 - protein, 7 aa, synthetic construct
TGPHTSR

SEQ ID NO: 198007 - protein, 7 aa, synthetic construct
TGRVKMD

SEQ ID NO: 198008 - protein, 7 aa, synthetic construct
TGRVHPS

SEQ ID NO: 198009 - protein, 7 aa, synthetic construct
TGRVHAI

SEQ ID NO: 198010 - protein, 7 aa, synthetic construct
TERKDSK

SEQ ID NO: 198011 - protein, 7 aa, synthetic construct
YMKVDSR

SEQ ID NO: 198012 - protein, 7 aa, synthetic construct
FGRVISN

SEQ ID NO: 198013 - protein, 7 aa, synthetic construct
TGRVIEK

SEQ ID NO: 198014 - protein, 7 aa, synthetic construct
TGRGDKT

SEQ ID NO: 198015 - protein, 7 aa, synthetic construct
LGRVDGK

SEQ ID NO: 198016 - protein, 7 aa, synthetic construct
KQRVDSM

SEQ ID NO: 198017 - protein, 7 aa, synthetic construct
TKRQDSI

SEQ ID NO: 198018 - protein, 7 aa, synthetic construct
KGSVESR

SEQ ID NO: 198019 - protein, 7 aa, synthetic construct
TGRVSAG

SEQ ID NO: 198020 - protein, 7 aa, synthetic construct
TARVPDR

SEQ ID NO: 198021 - protein, 7 aa, synthetic construct
AGRVDKI

SEQ ID NO: 198022 - protein, 7 aa, synthetic construct
TPRDDKR

SEQ ID NO: 198023 - protein, 7 aa, synthetic construct
IGRVISQ

SEQ ID NO: 198024 - protein, 7 aa, synthetic construct
MDRVSSR

SEQ ID NO: 198025 - protein, 7 aa, synthetic construct
VARVDVR

SEQ ID NO: 198026 - protein, 7 aa, synthetic construct
TGTVSHR

SEQ ID NO: 198027 - protein, 7 aa, synthetic construct
YQRVDSK

SEQ ID NO: 198028 - protein, 7 aa, synthetic construct
TGRVSKE

SEQ ID NO: 198029 - protein, 7 aa, synthetic construct
TGRVTRE

SEQ ID NO: 198030 - protein, 7 aa, synthetic construct
TGRTDNK

SEQ ID NO: 198031 - protein, 7 aa, synthetic construct
VDRKDSR

SEQ ID NO: 198032 - protein, 7 aa, synthetic construct
LGRVNSA

SEQ ID NO: 198033 - protein, 7 aa, synthetic construct
VDRVNSR

SEQ ID NO: 198034 - protein, 7 aa, synthetic construct
TGRVHGA

SEQ ID NO: 198035 - protein, 7 aa, synthetic construct
TGEVKYR

SEQ ID NO: 198036 - protein, 7 aa, synthetic construct
IGRVDTK

SEQ ID NO: 198037 - protein, 7 aa, synthetic construct
KGRVDNM

SEQ ID NO: 198038 - protein, 7 aa, synthetic construct
IGRVQSG

SEQ ID NO: 198039 - protein, 7 aa, synthetic construct
LQRVDNR

SEQ ID NO: 198040 - protein, 7 aa, synthetic construct
YKRVDSP

SEQ ID NO: 198041 - protein, 7 aa, synthetic construct
INRIDSR

SEQ ID NO: 198042 - protein, 7 aa, synthetic construct
TGRVREN

SEQ ID NO: 198043 - protein, 7 aa, synthetic construct
KGRQDSS

SEQ ID NO: 198044 - protein, 7 aa, synthetic construct
TGTQDKR

SEQ ID NO: 198045 - protein, 7 aa, synthetic construct
KGRVDLV

SEQ ID NO: 198046 - protein, 7 aa, synthetic construct
IGKMDSR

SEQ ID NO: 198047 - protein, 7 aa, synthetic construct
TERPMSR

SEQ ID NO: 198048 - protein, 7 aa, synthetic construct
YVRSDSR

SEQ ID NO: 198049 - protein, 7 aa, synthetic construct
TETVRSR

SEQ ID NO: 198050 - protein, 7 aa, synthetic construct
YGRVMSG

SEQ ID NO: 198051 - protein, 7 aa, synthetic construct
RGRVDTG

SEQ ID NO: 198052 - protein, 7 aa, synthetic construct
KNSVDSR

SEQ ID NO: 198053 - protein, 7 aa, synthetic construct
TGRTLER

SEQ ID NO: 198054 - protein, 7 aa, synthetic construct
TGRPDNR

SEQ ID NO: 198055 - protein, 7 aa, synthetic construct
RGRVDTP

SEQ ID NO: 198056 - protein, 7 aa, synthetic construct
TMDVRSR

SEQ ID NO: 198057 - protein, 7 aa, synthetic construct
TKRVDGM

SEQ ID NO: 198058 - protein, 7 aa, synthetic construct
VRNVDSR

SEQ ID NO: 198059 - protein, 7 aa, synthetic construct
TQRVEAR

SEQ ID NO: 198060 - protein, 7 aa, synthetic construct
TSSVDRR

SEQ ID NO: 198061 - protein, 7 aa, synthetic construct
TGRANSL

SEQ ID NO: 198062 - protein, 7 aa, synthetic construct
TDRKESR

SEQ ID NO: 198063 - protein, 7 aa, synthetic construct
DGKVDKR

SEQ ID NO: 198064 - protein, 7 aa, synthetic construct
VGRVDRP

SEQ ID NO: 198065 - protein, 7 aa, synthetic construct
TGAHPSR

SEQ ID NO: 198066 - protein, 7 aa, synthetic construct
LGRTESR

SEQ ID NO: 198067 - protein, 7 aa, synthetic construct
TGRQNDR

SEQ ID NO: 198068 - protein, 7 aa, synthetic construct
TRAQDSR

SEQ ID NO: 198069 - protein, 7 aa, synthetic construct
AVRTDSR

SEQ ID NO: 198070 - protein, 7 aa, synthetic construct
TGRVNQN

SEQ ID NO: 198071 - protein, 7 aa, synthetic construct
KAHVDSR

SEQ ID NO: 198072 - protein, 7 aa, synthetic construct
TGRGEIR

SEQ ID NO: 198073 - protein, 7 aa, synthetic construct
YGRVLSN

SEQ ID NO: 198074 - protein, 7 aa, synthetic construct
TGRSDVR

SEQ ID NO: 198075 - protein, 7 aa, synthetic construct
RTPVDSR

SEQ ID NO: 198076 - protein, 7 aa, synthetic construct
TREVSSR

SEQ ID NO: 198077 - protein, 7 aa, synthetic construct
TGYVKSN

SEQ ID NO: 198078 - protein, 7 aa, synthetic construct
YGKVESR

SEQ ID NO: 198079 - protein, 7 aa, synthetic construct
TGRLDKQ

SEQ ID NO: 198080 - protein, 7 aa, synthetic construct
TGKNDTR

SEQ ID NO: 198081 - protein, 7 aa, synthetic construct
EKRVDMR

SEQ ID NO: 198082 - protein, 7 aa, synthetic construct
MGRVLSG

SEQ ID NO: 198083 - protein, 7 aa, synthetic construct
TDTVRSR

SEQ ID NO: 198084 - protein, 7 aa, synthetic construct
VNRVDVR

SEQ ID NO: 198085 - protein, 7 aa, synthetic construct
TGRVERQ

SEQ ID NO: 198086 - protein, 7 aa, synthetic construct
TKGGDSR

SEQ ID NO: 198087 - protein, 7 aa, synthetic construct
TERISSR

SEQ ID NO: 198088 - protein, 7 aa, synthetic construct
TGVHASR

SEQ ID NO: 198089 - protein, 7 aa, synthetic construct
TGEMRSR

SEQ ID NO: 198090 - protein, 7 aa, synthetic construct
KFSVDSR

SEQ ID NO: 198091 - protein, 7 aa, synthetic construct
KGRVVSE

SEQ ID NO: 198092 - protein, 7 aa, synthetic construct
TGRQDKS

SEQ ID NO: 198093 - protein, 7 aa, synthetic construct
TGRGVER

SEQ ID NO: 198094 - protein, 7 aa, synthetic construct
TGKSDMR

SEQ ID NO: 198095 - protein, 7 aa, synthetic construct
IKRVDSP

SEQ ID NO: 198096 - protein, 7 aa, synthetic construct
TGKGDSR

SEQ ID NO: 198097 - protein, 7 aa, synthetic construct
TDRVIPR

SEQ ID NO: 198098 - protein, 7 aa, synthetic construct
HGRVNSA

SEQ ID NO: 198099 - protein, 7 aa, synthetic construct
TDRIASR

SEQ ID NO: 198100 - protein, 7 aa, synthetic construct
VGREVSR

SEQ ID NO: 198101 - protein, 7 aa, synthetic construct
YKSVDSR

SEQ ID NO: 198102 - protein, 7 aa, synthetic construct
QARGDSR

SEQ ID NO: 198103 - protein, 7 aa, synthetic construct
KQRDDSR

SEQ ID NO: 198104 - protein, 7 aa, synthetic construct
TVRVENR

SEQ ID NO: 198105 - protein, 7 aa, synthetic construct
TTRADSK

SEQ ID NO: 198106 - protein, 7 aa, synthetic construct
IGRTDAR

SEQ ID NO: 198107 - protein, 7 aa, synthetic construct
TKNQDSR

SEQ ID NO: 198108 - protein, 7 aa, synthetic construct
TGRLTDR

SEQ ID NO: 198109 - protein, 7 aa, synthetic construct
MGRLDSK

SEQ ID NO: 198110 - protein, 7 aa, synthetic construct
YKTVDSR

SEQ ID NO: 198111 - protein, 7 aa, synthetic construct
PGDVKSR

SEQ ID NO: 198112 - protein, 7 aa, synthetic construct
YGSKDSR

SEQ ID NO: 198113 - protein, 7 aa, synthetic construct
LMRTDSR

SEQ ID NO: 198114 - protein, 7 aa, synthetic construct
TGRVEKT

SEQ ID NO: 198115 - protein, 7 aa, synthetic construct
TGKRDSI

SEQ ID NO: 198116 - protein, 7 aa, synthetic construct
TGKYDNR

SEQ ID NO: 198117 - protein, 7 aa, synthetic construct
TKRQDST

SEQ ID NO: 198118 - protein, 7 aa, synthetic construct
TGRKDSA

SEQ ID NO: 198119 - protein, 7 aa, synthetic construct
SGRVQSN

SEQ ID NO: 198120 - protein, 7 aa, synthetic construct
TGRNASV

SEQ ID NO: 198121 - protein, 7 aa, synthetic construct
FGKVDSR

SEQ ID NO: 198122 - protein, 7 aa, synthetic construct
TARSDNR

SEQ ID NO: 198123 - protein, 7 aa, synthetic construct
IGRNDQR

SEQ ID NO: 198124 - protein, 7 aa, synthetic construct
VGRSDPR

SEQ ID NO: 198125 - protein, 7 aa, synthetic construct
TQRTDSK

SEQ ID NO: 198126 - protein, 7 aa, synthetic construct
KVRVDSA

SEQ ID NO: 198127 - protein, 7 aa, synthetic construct
TGHNTSR

SEQ ID NO: 198128 - protein, 7 aa, synthetic construct
IGRVASL

SEQ ID NO: 198129 - protein, 7 aa, synthetic construct
VGRVDQR

SEQ ID NO: 198130 - protein, 7 aa, synthetic construct
IGRQDSR

SEQ ID NO: 198131 - protein, 7 aa, synthetic construct
GKRVDSA

SEQ ID NO: 198132 - protein, 7 aa, synthetic construct
TPRDDRR

SEQ ID NO: 198133 - protein, 7 aa, synthetic construct
YGNKDSR

SEQ ID NO: 198134 - protein, 7 aa, synthetic construct
TGTHMSR

SEQ ID NO: 198135 - protein, 7 aa, synthetic construct
TLRVSER

SEQ ID NO: 198136 - protein, 7 aa, synthetic construct
VTRVESR

SEQ ID NO: 198137 - protein, 7 aa, synthetic construct
TDRVVAR

SEQ ID NO: 198138 - protein, 7 aa, synthetic construct
MGRVLSQ

SEQ ID NO: 198139 - protein, 7 aa, synthetic construct
YGHKDSR

SEQ ID NO: 198140 - protein, 7 aa, synthetic construct
TDRQSSR

SEQ ID NO: 198141 - protein, 7 aa, synthetic construct
SGRVDKQ

SEQ ID NO: 198142 - protein, 7 aa, synthetic construct
VNRVDSR

SEQ ID NO: 198143 - protein, 7 aa, synthetic construct
LGKIDSR

SEQ ID NO: 198144 - protein, 7 aa, synthetic construct
TGRIENR

SEQ ID NO: 198145 - protein, 7 aa, synthetic construct
TKRVDTS

SEQ ID NO: 198146 - protein, 7 aa, synthetic construct
MPRVDNR

SEQ ID NO: 198147 - protein, 7 aa, synthetic construct
TGPVHGR

SEQ ID NO: 198148 - protein, 7 aa, synthetic construct
TGRANSG

SEQ ID NO: 198149 - protein, 7 aa, synthetic construct
TSRNDIR

SEQ ID NO: 198150 - protein, 7 aa, synthetic construct
VGRQDGR

SEQ ID NO: 198151 - protein, 7 aa, synthetic construct
TKRVDMM

SEQ ID NO: 198152 - protein, 7 aa, synthetic construct
TGRGNER

SEQ ID NO: 198153 - protein, 7 aa, synthetic construct
VGRVVSQ

SEQ ID NO: 198154 - protein, 7 aa, synthetic construct
EGRVKSV

SEQ ID NO: 198155 - protein, 7 aa, synthetic construct
VQRNDSR

SEQ ID NO: 198156 - protein, 7 aa, synthetic construct
LGRVVSH

SEQ ID NO: 198157 - protein, 7 aa, synthetic construct
MRSVDSR

SEQ ID NO: 198158 - protein, 7 aa, synthetic construct
KSRVDSS

SEQ ID NO: 198159 - protein, 7 aa, synthetic construct
FGKADSR

SEQ ID NO: 198160 - protein, 7 aa, synthetic construct
LGRVSSV

SEQ ID NO: 198161 - protein, 7 aa, synthetic construct
GARVDSK

SEQ ID NO: 198162 - protein, 7 aa, synthetic construct
ADRVSSR

SEQ ID NO: 198163 - protein, 7 aa, synthetic construct
IVRNDSR

SEQ ID NO: 198164 - protein, 7 aa, synthetic construct
SGRVSER

SEQ ID NO: 198165 - protein, 7 aa, synthetic construct
AGRVDRG

SEQ ID NO: 198166 - protein, 7 aa, synthetic construct
TMRKDSL

SEQ ID NO: 198167 - protein, 7 aa, synthetic construct
FGRVISS

SEQ ID NO: 198168 - protein, 7 aa, synthetic construct
TDTVKSR

SEQ ID NO: 198169 - protein, 7 aa, synthetic construct
TGRKESG

SEQ ID NO: 198170 - protein, 7 aa, synthetic construct
MGREISR

SEQ ID NO: 198171 - protein, 7 aa, synthetic construct
KGRVASE

SEQ ID NO: 198172 - protein, 7 aa, synthetic construct
TTRVRSE

SEQ ID NO: 198173 - protein, 7 aa, synthetic construct
TGRPDKN

SEQ ID NO: 198174 - protein, 7 aa, synthetic construct
TKRVSSE

SEQ ID NO: 198175 - protein, 7 aa, synthetic construct
DARVPSR

SEQ ID NO: 198176 - protein, 7 aa, synthetic construct
VPRVDNR

SEQ ID NO: 198177 - protein, 7 aa, synthetic construct
TSRGDTR

SEQ ID NO: 198178 - protein, 7 aa, synthetic construct
TDRTVSR

SEQ ID NO: 198179 - protein, 7 aa, synthetic construct
YGRVNSA

SEQ ID NO: 198180 - protein, 7 aa, synthetic construct
TGRVTHT

SEQ ID NO: 198181 - protein, 7 aa, synthetic construct
TGARDNR

SEQ ID NO: 198182 - protein, 7 aa, synthetic construct
TDRPMSR

SEQ ID NO: 198183 - protein, 7 aa, synthetic construct
SGRVDGK

SEQ ID NO: 198184 - protein, 7 aa, synthetic construct
TGKADYR

SEQ ID NO: 198185 - protein, 7 aa, synthetic construct
FSRPDSR

SEQ ID NO: 198186 - protein, 7 aa, synthetic construct
QGRVDRA

SEQ ID NO: 198187 - protein, 7 aa, synthetic construct
QGRVQDR

SEQ ID NO: 198188 - protein, 7 aa, synthetic construct
TGRKESS

SEQ ID NO: 198189 - protein, 7 aa, synthetic construct
TQDVRSR

SEQ ID NO: 198190 - protein, 7 aa, synthetic construct
QGRVDPR

SEQ ID NO: 198191 - protein, 7 aa, synthetic construct
TSKQDSR

SEQ ID NO: 198192 - protein, 7 aa, synthetic construct
TGRTDAR

SEQ ID NO: 198193 - protein, 7 aa, synthetic construct
TRQVDVR

SEQ ID NO: 198194 - protein, 7 aa, synthetic construct
VSRVDIR

SEQ ID NO: 198195 - protein, 7 aa, synthetic construct
DKRIDSR

SEQ ID NO: 198196 - protein, 7 aa, synthetic construct
QKRVDSM

SEQ ID NO: 198197 - protein, 7 aa, synthetic construct
TGSVHAR

SEQ ID NO: 198198 - protein, 7 aa, synthetic construct
TGKHDVR

SEQ ID NO: 198199 - protein, 7 aa, synthetic construct
KNRVDSG

SEQ ID NO: 198200 - protein, 7 aa, synthetic construct
TGHVKER

SEQ ID NO: 198201 - protein, 7 aa, synthetic construct
TGRATSS

SEQ ID NO: 198202 - protein, 7 aa, synthetic construct
HGKVDNR

SEQ ID NO: 198203 - protein, 7 aa, synthetic construct
TKYVDAR

SEQ ID NO: 198204 - protein, 7 aa, synthetic construct
KSNVDSR

SEQ ID NO: 198205 - protein, 7 aa, synthetic construct
TGREISK

SEQ ID NO: 198206 - protein, 7 aa, synthetic construct
QGRGDSR

SEQ ID NO: 198207 - protein, 7 aa, synthetic construct
TQRVSDR

SEQ ID NO: 198208 - protein, 7 aa, synthetic construct
RSPVDSR

SEQ ID NO: 198209 - protein, 7 aa, synthetic construct
TGRNDRI

SEQ ID NO: 198210 - protein, 7 aa, synthetic construct
TGRPDKQ

SEQ ID NO: 198211 - protein, 7 aa, synthetic construct
TERVRSQ

SEQ ID NO: 198212 - protein, 7 aa, synthetic construct
LSRADSR

SEQ ID NO: 198213 - protein, 7 aa, synthetic construct
RPRVDSV

SEQ ID NO: 198214 - protein, 7 aa, synthetic construct
KGSNDSR

SEQ ID NO: 198215 - protein, 7 aa, synthetic construct
TDRQASR

SEQ ID NO: 198216 - protein, 7 aa, synthetic construct
TTGKDSR

SEQ ID NO: 198217 - protein, 7 aa, synthetic construct
IRTVDSR

SEQ ID NO: 198218 - protein, 7 aa, synthetic construct
IGRVSSG

SEQ ID NO: 198219 - protein, 7 aa, synthetic construct
EKKVDSR

SEQ ID NO: 198220 - protein, 7 aa, synthetic construct
ISRADSR

SEQ ID NO: 198221 - protein, 7 aa, synthetic construct
TDRNQSR

SEQ ID NO: 198222 - protein, 7 aa, synthetic construct
KGRVDVG

SEQ ID NO: 198223 - protein, 7 aa, synthetic construct
TGRNLSN

SEQ ID NO: 198224 - protein, 7 aa, synthetic construct
TGRIQER

SEQ ID NO: 198225 - protein, 7 aa, synthetic construct
THRVNSI

SEQ ID NO: 198226 - protein, 7 aa, synthetic construct
YGEVRSR

SEQ ID NO: 198227 - protein, 7 aa, synthetic construct
TGKVDRS

SEQ ID NO: 198228 - protein, 7 aa, synthetic construct
TTRGDAR

SEQ ID NO: 198229 - protein, 7 aa, synthetic construct
IGRVVSH

SEQ ID NO: 198230 - protein, 7 aa, synthetic construct
VGRVASH

SEQ ID NO: 198231 - protein, 7 aa, synthetic construct
MGRVHSI

SEQ ID NO: 198232 - protein, 7 aa, synthetic construct
VGRDISR

SEQ ID NO: 198233 - protein, 7 aa, synthetic construct
QGRVTSI

SEQ ID NO: 198234 - protein, 7 aa, synthetic construct
FSRVDSK

SEQ ID NO: 198235 - protein, 7 aa, synthetic construct
TGKFDVR

SEQ ID NO: 198236 - protein, 7 aa, synthetic construct
TVRVHSG

SEQ ID NO: 198237 - protein, 7 aa, synthetic construct
DKRQDSR

SEQ ID NO: 198238 - protein, 7 aa, synthetic construct
TGGVEKR

SEQ ID NO: 198239 - protein, 7 aa, synthetic construct
VGRVDNR

SEQ ID NO: 198240 - protein, 7 aa, synthetic construct
KGRVDMT

SEQ ID NO: 198241 - protein, 7 aa, synthetic construct
RQRVDSP

SEQ ID NO: 198242 - protein, 7 aa, synthetic construct
IGKVDYR

SEQ ID NO: 198243 - protein, 7 aa, synthetic construct
TGGSGSR

SEQ ID NO: 198244 - protein, 7 aa, synthetic construct
VGRVVSA

SEQ ID NO: 198245 - protein, 7 aa, synthetic construct
MPRTDSR

SEQ ID NO: 198246 - protein, 7 aa, synthetic construct
TREVDKR

SEQ ID NO: 198247 - protein, 7 aa, synthetic construct
MGRNDQR

SEQ ID NO: 198248 - protein, 7 aa, synthetic construct
TVHKDSR

SEQ ID NO: 198249 - protein, 7 aa, synthetic construct
VGKMDSR

SEQ ID NO: 198250 - protein, 7 aa, synthetic construct
TKHVESR

SEQ ID NO: 198251 - protein, 7 aa, synthetic construct
KGRVDNL

SEQ ID NO: 198252 - protein, 7 aa, synthetic construct
TDRVMPR

SEQ ID NO: 198253 - protein, 7 aa, synthetic construct
IHKVDSR

SEQ ID NO: 198254 - protein, 7 aa, synthetic construct
TGRGDVR

SEQ ID NO: 198255 - protein, 7 aa, synthetic construct
KGHVDTR

SEQ ID NO: 198256 - protein, 7 aa, synthetic construct
HGRVSSG

SEQ ID NO: 198257 - protein, 7 aa, synthetic construct
TGKHDGR

SEQ ID NO: 198258 - protein, 7 aa, synthetic construct
TQRVGDR

SEQ ID NO: 198259 - protein, 7 aa, synthetic construct
TRKDDSR

SEQ ID NO: 198260 - protein, 7 aa, synthetic construct
QGRVDAR

SEQ ID NO: 198261 - protein, 7 aa, synthetic construct
MGRIESR

SEQ ID NO: 198262 - protein, 7 aa, synthetic construct
KGRVDMV

SEQ ID NO: 198263 - protein, 7 aa, synthetic construct
ISRVDSK

SEQ ID NO: 198264 - protein, 7 aa, synthetic construct
IGRSDSR

SEQ ID NO: 198265 - protein, 7 aa, synthetic construct
LGRVVSQ

SEQ ID NO: 198266 - protein, 7 aa, synthetic construct
AKRVDSL

SEQ ID NO: 198267 - protein, 7 aa, synthetic construct
MGRQDAR

SEQ ID NO: 198268 - protein, 7 aa, synthetic construct
TGRNASI

SEQ ID NO: 198269 - protein, 7 aa, synthetic construct
AGRVETR

SEQ ID NO: 198270 - protein, 7 aa, synthetic construct
KARVDST

SEQ ID NO: 198271 - protein, 7 aa, synthetic construct
MGRVSSI

SEQ ID NO: 198272 - protein, 7 aa, synthetic construct
KGRVTSD

SEQ ID NO: 198273 - protein, 7 aa, synthetic construct
TGDKFSR

SEQ ID NO: 198274 - protein, 7 aa, synthetic construct
TTGVDRR

SEQ ID NO: 198275 - protein, 7 aa, synthetic construct
TQRNESR

SEQ ID NO: 198276 - protein, 7 aa, synthetic construct
LGRGDLR

SEQ ID NO: 198277 - protein, 7 aa, synthetic construct
VGRVASN

SEQ ID NO: 198278 - protein, 7 aa, synthetic construct
TGRADRL

SEQ ID NO: 198279 - protein, 7 aa, synthetic construct
TGRHVSA

SEQ ID NO: 198280 - protein, 7 aa, synthetic construct
TERMNSR

SEQ ID NO: 198281 - protein, 7 aa, synthetic construct
TGRVTHI

SEQ ID NO: 198282 - protein, 7 aa, synthetic construct
IGRVLSQ

SEQ ID NO: 198283 - protein, 7 aa, synthetic construct
MGRVLSA

SEQ ID NO: 198284 - protein, 7 aa, synthetic construct
DGNVRSR

SEQ ID NO: 198285 - protein, 7 aa, synthetic construct
KGRGDSV

SEQ ID NO: 198286 - protein, 7 aa, synthetic construct
QDRKDSR

SEQ ID NO: 198287 - protein, 7 aa, synthetic construct
TGRKDTL

SEQ ID NO: 198288 - protein, 7 aa, synthetic construct
TKAMDSR

SEQ ID NO: 198289 - protein, 7 aa, synthetic construct
TERGASR

SEQ ID NO: 198290 - protein, 7 aa, synthetic construct
TGKVDSR

SEQ ID NO: 198291 - protein, 7 aa, synthetic construct
TGRELPR

SEQ ID NO: 198292 - protein, 7 aa, synthetic construct
QGRVDMK

SEQ ID NO: 198293 - protein, 7 aa, synthetic construct
TDRTSSR

SEQ ID NO: 198294 - protein, 7 aa, synthetic construct
VGRTDNR

SEQ ID NO: 198295 - protein, 7 aa, synthetic construct
TDRVTVR

SEQ ID NO: 198296 - protein, 7 aa, synthetic construct
TGSVHPR

SEQ ID NO: 198297 - protein, 7 aa, synthetic construct
RVRVDSG

SEQ ID NO: 198298 - protein, 7 aa, synthetic construct
TKAGDSR

SEQ ID NO: 198299 - protein, 7 aa, synthetic construct
VSRVDNR

SEQ ID NO: 198300 - protein, 7 aa, synthetic construct
TGTHTSR

SEQ ID NO: 198301 - protein, 7 aa, synthetic construct
KGSTDSR

SEQ ID NO: 198302 - protein, 7 aa, synthetic construct
TARQDNR

SEQ ID NO: 198303 - protein, 7 aa, synthetic construct
TQRKDDR

SEQ ID NO: 198304 - protein, 7 aa, synthetic construct
VKRVDSL

SEQ ID NO: 198305 - protein, 7 aa, synthetic construct
SKNVDSR

SEQ ID NO: 198306 - protein, 7 aa, synthetic construct
QGRADTR

SEQ ID NO: 198307 - protein, 7 aa, synthetic construct
TARPDNR

SEQ ID NO: 198308 - protein, 7 aa, synthetic construct
TGRGISV

SEQ ID NO: 198309 - protein, 7 aa, synthetic construct
KGRVDNF

SEQ ID NO: 198310 - protein, 7 aa, synthetic construct
TGRTTSN

SEQ ID NO: 198311 - protein, 7 aa, synthetic construct
MGHKDSR

SEQ ID NO: 198312 - protein, 7 aa, synthetic construct
TGRVDNR

SEQ ID NO: 198313 - protein, 7 aa, synthetic construct
TGRKEDR

SEQ ID NO: 198314 - protein, 7 aa, synthetic construct
TDKVDKR

SEQ ID NO: 198315 - protein, 7 aa, synthetic construct
QGRTDVR

SEQ ID NO: 198316 - protein, 7 aa, synthetic construct
MGRETSR

SEQ ID NO: 198317 - protein, 7 aa, synthetic construct
TFRVSSG

SEQ ID NO: 198318 - protein, 7 aa, synthetic construct
TGDVIRR

SEQ ID NO: 198319 - protein, 7 aa, synthetic construct
VIRSDSR

SEQ ID NO: 198320 - protein, 7 aa, synthetic construct
TGSTHSR

SEQ ID NO: 198321 - protein, 7 aa, synthetic construct
QGRTDTR

SEQ ID NO: 198322 - protein, 7 aa, synthetic construct
GVRVDPR

SEQ ID NO: 198323 - protein, 7 aa, synthetic construct
TGRIVDR

SEQ ID NO: 198324 - protein, 7 aa, synthetic construct
IGRVEVR

SEQ ID NO: 198325 - protein, 7 aa, synthetic construct
TAQVDKR

SEQ ID NO: 198326 - protein, 7 aa, synthetic construct
TDRVSAR

SEQ ID NO: 198327 - protein, 7 aa, synthetic construct
TTRVDRG

SEQ ID NO: 198328 - protein, 7 aa, synthetic construct
TGPVHAR

SEQ ID NO: 198329 - protein, 7 aa, synthetic construct
TGRTTSS

SEQ ID NO: 198330 - protein, 7 aa, synthetic construct
TGKMDTR

SEQ ID NO: 198331 - protein, 7 aa, synthetic construct
TGGRDNR

SEQ ID NO: 198332 - protein, 7 aa, synthetic construct
TGVRESR

SEQ ID NO: 198333 - protein, 7 aa, synthetic construct
TDRVNSR

SEQ ID NO: 198334 - protein, 7 aa, synthetic construct
IGKGDSR

SEQ ID NO: 198335 - protein, 7 aa, synthetic construct
AQRGDSR

SEQ ID NO: 198336 - protein, 7 aa, synthetic construct
VGSRDSR

SEQ ID NO: 198337 - protein, 7 aa, synthetic construct
ASRVDNR

SEQ ID NO: 198338 - protein, 7 aa, synthetic construct
TGRNDQR

SEQ ID NO: 198339 - protein, 7 aa, synthetic construct
TAREDKR

SEQ ID NO: 198340 - protein, 7 aa, synthetic construct
QGRVISG

SEQ ID NO: 198341 - protein, 7 aa, synthetic construct
IGRVDKV

SEQ ID NO: 198342 - protein, 7 aa, synthetic construct
TGRAEIR

SEQ ID NO: 198343 - protein, 7 aa, synthetic construct
DGKVASR

SEQ ID NO: 198344 - protein, 7 aa, synthetic construct
TGRMDKL

SEQ ID NO: 198345 - protein, 7 aa, synthetic construct
DGRVKSV

SEQ ID NO: 198346 - protein, 7 aa, synthetic construct
IGAVHSR

SEQ ID NO: 198347 - protein, 7 aa, synthetic construct
VGKADSR

SEQ ID NO: 198348 - protein, 7 aa, synthetic construct
TGRQGER

SEQ ID NO: 198349 - protein, 7 aa, synthetic construct
TQRKDSL

SEQ ID NO: 198350 - protein, 7 aa, synthetic construct
RGQVESR

SEQ ID NO: 198351 - protein, 7 aa, synthetic construct
AGRVTSA

SEQ ID NO: 198352 - protein, 7 aa, synthetic construct
TGRGIER

SEQ ID NO: 198353 - protein, 7 aa, synthetic construct
TSREQSR

SEQ ID NO: 198354 - protein, 7 aa, synthetic construct
TNRADSK

SEQ ID NO: 198355 - protein, 7 aa, synthetic construct
THRVLSA

SEQ ID NO: 198356 - protein, 7 aa, synthetic construct
KGRVDGV

SEQ ID NO: 198357 - protein, 7 aa, synthetic construct
LGRVTSL

SEQ ID NO: 198358 - protein, 7 aa, synthetic construct
MRGVDSR

SEQ ID NO: 198359 - protein, 7 aa, synthetic construct
TGRVHGS

SEQ ID NO: 198360 - protein, 7 aa, synthetic construct
TIRVSDR

SEQ ID NO: 198361 - protein, 7 aa, synthetic construct
KQGVDSR

SEQ ID NO: 198362 - protein, 7 aa, synthetic construct
MGRQDGR

SEQ ID NO: 198363 - protein, 7 aa, synthetic construct
TGTVHAR

SEQ ID NO: 198364 - protein, 7 aa, synthetic construct
TGRPELR

SEQ ID NO: 198365 - protein, 7 aa, synthetic construct
TRVVDAR

SEQ ID NO: 198366 - protein, 7 aa, synthetic construct
TRPVDPR

SEQ ID NO: 198367 - protein, 7 aa, synthetic construct
TGFKDSR

SEQ ID NO: 198368 - protein, 7 aa, synthetic construct
TAKVDHR

SEQ ID NO: 198369 - protein, 7 aa, synthetic construct
TDRKDPR

SEQ ID NO: 198370 - protein, 7 aa, synthetic construct
TGREANR

SEQ ID NO: 198371 - protein, 7 aa, synthetic construct
TLRKDSS

SEQ ID NO: 198372 - protein, 7 aa, synthetic construct
TGRATDR

SEQ ID NO: 198373 - protein, 7 aa, synthetic construct
VGKVDMR

SEQ ID NO: 198374 - protein, 7 aa, synthetic construct
TARPESR

SEQ ID NO: 198375 - protein, 7 aa, synthetic construct
TGTHASR

SEQ ID NO: 198376 - protein, 7 aa, synthetic construct
TERVTVR

SEQ ID NO: 198377 - protein, 7 aa, synthetic construct
QSRVDSR

SEQ ID NO: 198378 - protein, 7 aa, synthetic construct
TEAVRSR

SEQ ID NO: 198379 - protein, 7 aa, synthetic construct
QGRVESK

SEQ ID NO: 198380 - protein, 7 aa, synthetic construct
IGRVVSS

SEQ ID NO: 198381 - protein, 7 aa, synthetic construct
TKPYDSR

SEQ ID NO: 198382 - protein, 7 aa, synthetic construct
LIRNDSR

SEQ ID NO: 198383 - protein, 7 aa, synthetic construct
TGKPDNR

SEQ ID NO: 198384 - protein, 7 aa, synthetic construct
QGRGDPR

SEQ ID NO: 198385 - protein, 7 aa, synthetic construct
KGRDDGR

SEQ ID NO: 198386 - protein, 7 aa, synthetic construct
TGRVHLQ

SEQ ID NO: 198387 - protein, 7 aa, synthetic construct
KGRADSI

SEQ ID NO: 198388 - protein, 7 aa, synthetic construct
TAKHDSR

SEQ ID NO: 198389 - protein, 7 aa, synthetic construct
TGIQDKR

SEQ ID NO: 198390 - protein, 7 aa, synthetic construct
VGRVSSM

SEQ ID NO: 198391 - protein, 7 aa, synthetic construct
TGHTGSR

SEQ ID NO: 198392 - protein, 7 aa, synthetic construct
TGRPDKI

SEQ ID NO: 198393 - protein, 7 aa, synthetic construct
VKREDSR

SEQ ID NO: 198394 - protein, 7 aa, synthetic construct
TVNVDRR

SEQ ID NO: 198395 - protein, 7 aa, synthetic construct
TGRKDGA

SEQ ID NO: 198396 - protein, 7 aa, synthetic construct
TGKYDAR

SEQ ID NO: 198397 - protein, 7 aa, synthetic construct
QGRVNSA

SEQ ID NO: 198398 - protein, 7 aa, synthetic construct
TGRVHPV

SEQ ID NO: 198399 - protein, 7 aa, synthetic construct
VGRVNSN

SEQ ID NO: 198400 - protein, 7 aa, synthetic construct
IGFKDSR

SEQ ID NO: 198401 - protein, 7 aa, synthetic construct
LGRVASH

SEQ ID NO: 198402 - protein, 7 aa, synthetic construct
QARVDLR

SEQ ID NO: 198403 - protein, 7 aa, synthetic construct
TGKQDYR

SEQ ID NO: 198404 - protein, 7 aa, synthetic construct
KARVDSA

SEQ ID NO: 198405 - protein, 7 aa, synthetic construct
IKRVDSA

SEQ ID NO: 198406 - protein, 7 aa, synthetic construct
TTRPESR

SEQ ID NO: 198407 - protein, 7 aa, synthetic construct
THKQDSR

SEQ ID NO: 198408 - protein, 7 aa, synthetic construct
MTRTDSR

SEQ ID NO: 198409 - protein, 7 aa, synthetic construct
TRQVDNR

SEQ ID NO: 198410 - protein, 7 aa, synthetic construct
TGRTDKT

SEQ ID NO: 198411 - protein, 7 aa, synthetic construct
TGRVMRD

SEQ ID NO: 198412 - protein, 7 aa, synthetic construct
YGRVSDR

SEQ ID NO: 198413 - protein, 7 aa, synthetic construct
LPRNDSR

SEQ ID NO: 198414 - protein, 7 aa, synthetic construct
AGRQDAR

SEQ ID NO: 198415 - protein, 7 aa, synthetic construct
SDRVNSR

SEQ ID NO: 198416 - protein, 7 aa, synthetic construct
KMRVDDR

SEQ ID NO: 198417 - protein, 7 aa, synthetic construct
TYKGDSR

SEQ ID NO: 198418 - protein, 7 aa, synthetic construct
TGRVERA

SEQ ID NO: 198419 - protein, 7 aa, synthetic construct
TDRSMSR

SEQ ID NO: 198420 - protein, 7 aa, synthetic construct
TGRTSSV

SEQ ID NO: 198421 - protein, 7 aa, synthetic construct
TGKVDRM

SEQ ID NO: 198422 - protein, 7 aa, synthetic construct
TTRKDST

SEQ ID NO: 198423 - protein, 7 aa, synthetic construct
TGRQQER

SEQ ID NO: 198424 - protein, 7 aa, synthetic construct
LGKVDGR

SEQ ID NO: 198425 - protein, 7 aa, synthetic construct
TGRVHQI

SEQ ID NO: 198426 - protein, 7 aa, synthetic construct
MGKSDSR

SEQ ID NO: 198427 - protein, 7 aa, synthetic construct
LGRVDKF

SEQ ID NO: 198428 - protein, 7 aa, synthetic construct
TGRIDRG

SEQ ID NO: 198429 - protein, 7 aa, synthetic construct
TPRQDNR

SEQ ID NO: 198430 - protein, 7 aa, synthetic construct
YGRVISG

SEQ ID NO: 198431 - protein, 7 aa, synthetic construct
IARVESR

SEQ ID NO: 198432 - protein, 7 aa, synthetic construct
MTRVDSR

SEQ ID NO: 198433 - protein, 7 aa, synthetic construct
VGRVDKL

SEQ ID NO: 198434 - protein, 7 aa, synthetic construct
KQRVDSF

SEQ ID NO: 198435 - protein, 7 aa, synthetic construct
TERVSQR

SEQ ID NO: 198436 - protein, 7 aa, synthetic construct
TDRGTSR

SEQ ID NO: 198437 - protein, 7 aa, synthetic construct
ADRVNSR

SEQ ID NO: 198438 - protein, 7 aa, synthetic construct
TGKVHSH

SEQ ID NO: 198439 - protein, 7 aa, synthetic construct
TLEVKSR

SEQ ID NO: 198440 - protein, 7 aa, synthetic construct
IGNRDSR

SEQ ID NO: 198441 - protein, 7 aa, synthetic construct
QDRVVSR

SEQ ID NO: 198442 - protein, 7 aa, synthetic construct
TKRVDVL

SEQ ID NO: 198443 - protein, 7 aa, synthetic construct
TGRNTST

SEQ ID NO: 198444 - protein, 7 aa, synthetic construct
TGKMDLR

SEQ ID NO: 198445 - protein, 7 aa, synthetic construct
TTRQESR

SEQ ID NO: 198446 - protein, 7 aa, synthetic construct
GGRVDGK

SEQ ID NO: 198447 - protein, 7 aa, synthetic construct
TGRKDSG

SEQ ID NO: 198448 - protein, 7 aa, synthetic construct
TGRVTGG

SEQ ID NO: 198449 - protein, 7 aa, synthetic construct
TERTTSR

SEQ ID NO: 198450 - protein, 7 aa, synthetic construct
MNRVDTR

SEQ ID NO: 198451 - protein, 7 aa, synthetic construct
KQHVDSR

SEQ ID NO: 198452 - protein, 7 aa, synthetic construct
QGRIDTR

SEQ ID NO: 198453 - protein, 7 aa, synthetic construct
QGKSDSR

SEQ ID NO: 198454 - protein, 7 aa, synthetic construct
TGRVRDI

SEQ ID NO: 198455 - protein, 7 aa, synthetic construct
KGRNDSI

SEQ ID NO: 198456 - protein, 7 aa, synthetic construct
MGRVKSD

SEQ ID NO: 198457 - protein, 7 aa, synthetic construct
IGRVDAR

SEQ ID NO: 198458 - protein, 7 aa, synthetic construct
TGRVSLQ

SEQ ID NO: 198459 - protein, 7 aa, synthetic construct
MKRVDSM

SEQ ID NO: 198460 - protein, 7 aa, synthetic construct
TGRNTSL

SEQ ID NO: 198461 - protein, 7 aa, synthetic construct
MGRVIER

SEQ ID NO: 198462 - protein, 7 aa, synthetic construct
TARVNER

SEQ ID NO: 198463 - protein, 7 aa, synthetic construct
TGRIDKI

SEQ ID NO: 198464 - protein, 7 aa, synthetic construct
TGRVYKE

SEQ ID NO: 198465 - protein, 7 aa, synthetic construct
KVRVDER

SEQ ID NO: 198466 - protein, 7 aa, synthetic construct
TKRSDSG

SEQ ID NO: 198467 - protein, 7 aa, synthetic construct
TGRTGDR

SEQ ID NO: 198468 - protein, 7 aa, synthetic construct
TERVSMR

SEQ ID NO: 198469 - protein, 7 aa, synthetic construct
TGDRSSR

SEQ ID NO: 198470 - protein, 7 aa, synthetic construct
QGKVDFR

SEQ ID NO: 198471 - protein, 7 aa, synthetic construct
MKRVDSI

SEQ ID NO: 198472 - protein, 7 aa, synthetic construct
TGRVKGE

SEQ ID NO: 198473 - protein, 7 aa, synthetic construct
KGRADSG

SEQ ID NO: 198474 - protein, 7 aa, synthetic construct
KSMVDSR

SEQ ID NO: 198475 - protein, 7 aa, synthetic construct
TNPRDSR

SEQ ID NO: 198476 - protein, 7 aa, synthetic construct
IKRVDSN

SEQ ID NO: 198477 - protein, 7 aa, synthetic construct
TKGVESR

SEQ ID NO: 198478 - protein, 7 aa, synthetic construct
IGRVGDR

SEQ ID NO: 198479 - protein, 7 aa, synthetic construct
TPRVISQ

SEQ ID NO: 198480 - protein, 7 aa, synthetic construct
TGRKDMS

SEQ ID NO: 198481 - protein, 7 aa, synthetic construct
TGEVPKR

SEQ ID NO: 198482 - protein, 7 aa, synthetic construct
TERASSR

SEQ ID NO: 198483 - protein, 7 aa, synthetic construct
AGRVDRA

SEQ ID NO: 198484 - protein, 7 aa, synthetic construct
QIRTDSR

SEQ ID NO: 198485 - protein, 7 aa, synthetic construct
TMRNDVR

SEQ ID NO: 198486 - protein, 7 aa, synthetic construct
TSRADTR

SEQ ID NO: 198487 - protein, 7 aa, synthetic construct
TGRQTST

SEQ ID NO: 198488 - protein, 7 aa, synthetic construct
LGRVMSS

SEQ ID NO: 198489 - protein, 7 aa, synthetic construct
TTRVETR

SEQ ID NO: 198490 - protein, 7 aa, synthetic construct
VQRVDTR

SEQ ID NO: 198491 - protein, 7 aa, synthetic construct
TGKGDLR

SEQ ID NO: 198492 - protein, 7 aa, synthetic construct
RSSVDSR

SEQ ID NO: 198493 - protein, 7 aa, synthetic construct
TEKVASR

SEQ ID NO: 198494 - protein, 7 aa, synthetic construct
TERVAIR

SEQ ID NO: 198495 - protein, 7 aa, synthetic construct
TGREVNR

SEQ ID NO: 198496 - protein, 7 aa, synthetic construct
TGRGMSN

SEQ ID NO: 198497 - protein, 7 aa, synthetic construct
YGIKDSR

SEQ ID NO: 198498 - protein, 7 aa, synthetic construct
TQRVDKQ

SEQ ID NO: 198499 - protein, 7 aa, synthetic construct
IKRDDSR

SEQ ID NO: 198500 - protein, 7 aa, synthetic construct
DPRKDSR

SEQ ID NO: 198501 - protein, 7 aa, synthetic construct
IGRQDNR

SEQ ID NO: 198502 - protein, 7 aa, synthetic construct
TGEVVKR

SEQ ID NO: 198503 - protein, 7 aa, synthetic construct
MGRVSSL

SEQ ID NO: 198504 - protein, 7 aa, synthetic construct
DGRVIPR

SEQ ID NO: 198505 - protein, 7 aa, synthetic construct
KGRVDFG

SEQ ID NO: 198506 - protein, 7 aa, synthetic construct
KGRTDSG

SEQ ID NO: 198507 - protein, 7 aa, synthetic construct
TERTNSR

SEQ ID NO: 198508 - protein, 7 aa, synthetic construct
NRPVDSR

SEQ ID NO: 198509 - protein, 7 aa, synthetic construct
KGRVDGA

SEQ ID NO: 198510 - protein, 7 aa, synthetic construct
PGRVKSE

SEQ ID NO: 198511 - protein, 7 aa, synthetic construct
TGRTAER

SEQ ID NO: 198512 - protein, 7 aa, synthetic construct
TGRVDMK

SEQ ID NO: 198513 - protein, 7 aa, synthetic construct
TMRKDSI

SEQ ID NO: 198514 - protein, 7 aa, synthetic construct
TGRMEVR

SEQ ID NO: 198515 - protein, 7 aa, synthetic construct
MGRDTSR

SEQ ID NO: 198516 - protein, 7 aa, synthetic construct
GGRGDLR

SEQ ID NO: 198517 - protein, 7 aa, synthetic construct
AGRVENR

SEQ ID NO: 198518 - protein, 7 aa, synthetic construct
THRVSSI

SEQ ID NO: 198519 - protein, 7 aa, synthetic construct
TGRTNDR

SEQ ID NO: 198520 - protein, 7 aa, synthetic construct
KGRVDSM

SEQ ID NO: 198521 - protein, 7 aa, synthetic construct
TQKVDHR

SEQ ID NO: 198522 - protein, 7 aa, synthetic construct
TLRVDRG

SEQ ID NO: 198523 - protein, 7 aa, synthetic construct
TGRKDAA

SEQ ID NO: 198524 - protein, 7 aa, synthetic construct
MTRNDSR

SEQ ID NO: 198525 - protein, 7 aa, synthetic construct
TGRVSGA

SEQ ID NO: 198526 - protein, 7 aa, synthetic construct
MSRVDPR

SEQ ID NO: 198527 - protein, 7 aa, synthetic construct
TGRVQAN

SEQ ID NO: 198528 - protein, 7 aa, synthetic construct
FGKVESR

SEQ ID NO: 198529 - protein, 7 aa, synthetic construct
RSTVDSR

SEQ ID NO: 198530 - protein, 7 aa, synthetic construct
TGRTDRG

SEQ ID NO: 198531 - protein, 7 aa, synthetic construct
TGASDRR

SEQ ID NO: 198532 - protein, 7 aa, synthetic construct
DKRVDSR

SEQ ID NO: 198533 - protein, 7 aa, synthetic construct
YDRVTSR

SEQ ID NO: 198534 - protein, 7 aa, synthetic construct
SGKVESR

SEQ ID NO: 198535 - protein, 7 aa, synthetic construct
QTRVDSK

SEQ ID NO: 198536 - protein, 7 aa, synthetic construct
GNRGDSR

SEQ ID NO: 198537 - protein, 7 aa, synthetic construct
TGKSDFR

SEQ ID NO: 198538 - protein, 7 aa, synthetic construct
TGRTDRM

SEQ ID NO: 198539 - protein, 7 aa, synthetic construct
TGRVMKE

SEQ ID NO: 198540 - protein, 7 aa, synthetic construct
TRSNDSR

SEQ ID NO: 198541 - protein, 7 aa, synthetic construct
AGRVDKY

SEQ ID NO: 198542 - protein, 7 aa, synthetic construct
AGRKDSP

SEQ ID NO: 198543 - protein, 7 aa, synthetic construct
TGPRESR

SEQ ID NO: 198544 - protein, 7 aa, synthetic construct
TEREKSR

SEQ ID NO: 198545 - protein, 7 aa, synthetic construct
TERGISR

SEQ ID NO: 198546 - protein, 7 aa, synthetic construct
FGRKDSV

SEQ ID NO: 198547 - protein, 7 aa, synthetic construct
TGRKESF

SEQ ID NO: 198548 - protein, 7 aa, synthetic construct
TGHPNSR

SEQ ID NO: 198549 - protein, 7 aa, synthetic construct
TRMVDAR

SEQ ID NO: 198550 - protein, 7 aa, synthetic construct
TGRITDR

SEQ ID NO: 198551 - protein, 7 aa, synthetic construct
IGRVTSV

SEQ ID NO: 198552 - protein, 7 aa, synthetic construct
VGSKDSR

SEQ ID NO: 198553 - protein, 7 aa, synthetic construct
TNRADTR

SEQ ID NO: 198554 - protein, 7 aa, synthetic construct
RTNVDSR

SEQ ID NO: 198555 - protein, 7 aa, synthetic construct
TGERTSR

SEQ ID NO: 198556 - protein, 7 aa, synthetic construct
QGRVTSA

SEQ ID NO: 198557 - protein, 7 aa, synthetic construct
TGKGDQR

SEQ ID NO: 198558 - protein, 7 aa, synthetic construct
QPRVDGR

SEQ ID NO: 198559 - protein, 7 aa, synthetic construct
RGDKDSR

SEQ ID NO: 198560 - protein, 7 aa, synthetic construct
TGRNTSS

SEQ ID NO: 198561 - protein, 7 aa, synthetic construct
KGRTDSI

SEQ ID NO: 198562 - protein, 7 aa, synthetic construct
TKNFDSR

SEQ ID NO: 198563 - protein, 7 aa, synthetic construct
TGRQEAR

SEQ ID NO: 198564 - protein, 7 aa, synthetic construct
TDKVDRR

SEQ ID NO: 198565 - protein, 7 aa, synthetic construct
TGHIGSR

SEQ ID NO: 198566 - protein, 7 aa, synthetic construct
VNRVDMR

SEQ ID NO: 198567 - protein, 7 aa, synthetic construct
TTRVSDR

SEQ ID NO: 198568 - protein, 7 aa, synthetic construct
KGRVDQF

SEQ ID NO: 198569 - protein, 7 aa, synthetic construct
TGKGDVR

SEQ ID NO: 198570 - protein, 7 aa, synthetic construct
VKQVDSR

SEQ ID NO: 198571 - protein, 7 aa, synthetic construct
VGRIDGR

SEQ ID NO: 198572 - protein, 7 aa, synthetic construct
TERQASR

SEQ ID NO: 198573 - protein, 7 aa, synthetic construct
MGRVSSM

SEQ ID NO: 198574 - protein, 7 aa, synthetic construct
TGRSDKM

SEQ ID NO: 198575 - protein, 7 aa, synthetic construct
TGHVSNR

SEQ ID NO: 198576 - protein, 7 aa, synthetic construct
GSRVDAR

SEQ ID NO: 198577 - protein, 7 aa, synthetic construct
TNRAESR

SEQ ID NO: 198578 - protein, 7 aa, synthetic construct
TGKKDER

SEQ ID NO: 198579 - protein, 7 aa, synthetic construct
GARVESR

SEQ ID NO: 198580 - protein, 7 aa, synthetic construct
TGDVRGR

SEQ ID NO: 198581 - protein, 7 aa, synthetic construct
LDRVGSR

SEQ ID NO: 198582 - protein, 7 aa, synthetic construct
IVRGDSR

SEQ ID NO: 198583 - protein, 7 aa, synthetic construct
LGRVDRG

SEQ ID NO: 198584 - protein, 7 aa, synthetic construct
KGASDSR

SEQ ID NO: 198585 - protein, 7 aa, synthetic construct
TGKFDNR

SEQ ID NO: 198586 - protein, 7 aa, synthetic construct
MQRVDSK

SEQ ID NO: 198587 - protein, 7 aa, synthetic construct
NKRVDSM

SEQ ID NO: 198588 - protein, 7 aa, synthetic construct
TKRVDTL

SEQ ID NO: 198589 - protein, 7 aa, synthetic construct
TSRQDPR

SEQ ID NO: 198590 - protein, 7 aa, synthetic construct
TAHKDSR

SEQ ID NO: 198591 - protein, 7 aa, synthetic construct
NVRQDSR

SEQ ID NO: 198592 - protein, 7 aa, synthetic construct
RQGVDSR

SEQ ID NO: 198593 - protein, 7 aa, synthetic construct
TGRGDGR

SEQ ID NO: 198594 - protein, 7 aa, synthetic construct
WGGKDSR

SEQ ID NO: 198595 - protein, 7 aa, synthetic construct
TQRKDSF

SEQ ID NO: 198596 - protein, 7 aa, synthetic construct
TVRQDGR

SEQ ID NO: 198597 - protein, 7 aa, synthetic construct
SGRVPDR

SEQ ID NO: 198598 - protein, 7 aa, synthetic construct
TGRGDKS

SEQ ID NO: 198599 - protein, 7 aa, synthetic construct
TKEVFSR

SEQ ID NO: 198600 - protein, 7 aa, synthetic construct
TRNMDSR

SEQ ID NO: 198601 - protein, 7 aa, synthetic construct
TDRGSSR

SEQ ID NO: 198602 - protein, 7 aa, synthetic construct
TGRVSDK

SEQ ID NO: 198603 - protein, 7 aa, synthetic construct
TGRVETK

SEQ ID NO: 198604 - protein, 7 aa, synthetic construct
TDRVNMR

SEQ ID NO: 198605 - protein, 7 aa, synthetic construct
LGRVEMR

SEQ ID NO: 198606 - protein, 7 aa, synthetic construct
TSRGDAR

SEQ ID NO: 198607 - protein, 7 aa, synthetic construct
TKRDDLR

SEQ ID NO: 198608 - protein, 7 aa, synthetic construct
QGRVSSA

SEQ ID NO: 198609 - protein, 7 aa, synthetic construct
FAKVDSR

SEQ ID NO: 198610 - protein, 7 aa, synthetic construct
IGREISR

SEQ ID NO: 198611 - protein, 7 aa, synthetic construct
TGAQDRR

SEQ ID NO: 198612 - protein, 7 aa, synthetic construct
TRNVDGR

SEQ ID NO: 198613 - protein, 7 aa, synthetic construct
TRKVDST

SEQ ID NO: 198614 - protein, 7 aa, synthetic construct
TGRVQEK

SEQ ID NO: 198615 - protein, 7 aa, synthetic construct
VGRVDRQ

SEQ ID NO: 198616 - protein, 7 aa, synthetic construct
QGRMDSK

SEQ ID NO: 198617 - protein, 7 aa, synthetic construct
TDRVQGR

SEQ ID NO: 198618 - protein, 7 aa, synthetic construct
TKQVDYR

SEQ ID NO: 198619 - protein, 7 aa, synthetic construct
TRGNDSR

SEQ ID NO: 198620 - protein, 7 aa, synthetic construct
IGRVQER

SEQ ID NO: 198621 - protein, 7 aa, synthetic construct
TKPVDHR

SEQ ID NO: 198622 - protein, 7 aa, synthetic construct
TGVHGSR

SEQ ID NO: 198623 - protein, 7 aa, synthetic construct
VIRNDSR

SEQ ID NO: 198624 - protein, 7 aa, synthetic construct
SARGDSR

SEQ ID NO: 198625 - protein, 7 aa, synthetic construct
TELVKSR

SEQ ID NO: 198626 - protein, 7 aa, synthetic construct
TGRGTSA

SEQ ID NO: 198627 - protein, 7 aa, synthetic construct
THIKDSR

SEQ ID NO: 198628 - protein, 7 aa, synthetic construct
VNRVDAR

SEQ ID NO: 198629 - protein, 7 aa, synthetic construct
TFRQDSK

SEQ ID NO: 198630 - protein, 7 aa, synthetic construct
LGRSDAR

SEQ ID NO: 198631 - protein, 7 aa, synthetic construct
TRAVDAR

SEQ ID NO: 198632 - protein, 7 aa, synthetic construct
VGRVLSS

SEQ ID NO: 198633 - protein, 7 aa, synthetic construct
TGRVLHA

SEQ ID NO: 198634 - protein, 7 aa, synthetic construct
TNREVSR

SEQ ID NO: 198635 - protein, 7 aa, synthetic construct
IDRVDKR

SEQ ID NO: 198636 - protein, 7 aa, synthetic construct
RGPVDSR

SEQ ID NO: 198637 - protein, 7 aa, synthetic construct
IGRNESR

SEQ ID NO: 198638 - protein, 7 aa, synthetic construct
VGRTDQR

SEQ ID NO: 198639 - protein, 7 aa, synthetic construct
SGRVADR

SEQ ID NO: 198640 - protein, 7 aa, synthetic construct
YGRVISQ

SEQ ID NO: 198641 - protein, 7 aa, synthetic construct
TIRQESR

SEQ ID NO: 198642 - protein, 7 aa, synthetic construct
GNRVESR

SEQ ID NO: 198643 - protein, 7 aa, synthetic construct
TPRVISH

SEQ ID NO: 198644 - protein, 7 aa, synthetic construct
IGRKDSV

SEQ ID NO: 198645 - protein, 7 aa, synthetic construct
QDRVNSR

SEQ ID NO: 198646 - protein, 7 aa, synthetic construct
IGRIDNR

SEQ ID NO: 198647 - protein, 7 aa, synthetic construct
TGKVDRF

SEQ ID NO: 198648 - protein, 7 aa, synthetic construct
TGRVKDV

SEQ ID NO: 198649 - protein, 7 aa, synthetic construct
QARIDSR

SEQ ID NO: 198650 - protein, 7 aa, synthetic construct
QGRQDVR

SEQ ID NO: 198651 - protein, 7 aa, synthetic construct
TGRSQSN

SEQ ID NO: 198652 - protein, 7 aa, synthetic construct
TARNDMR

SEQ ID NO: 198653 - protein, 7 aa, synthetic construct
TDNVRSR

SEQ ID NO: 198654 - protein, 7 aa, synthetic construct
HGRVVSA

SEQ ID NO: 198655 - protein, 7 aa, synthetic construct
THKGDSR

SEQ ID NO: 198656 - protein, 7 aa, synthetic construct
NKRVDSV

SEQ ID NO: 198657 - protein, 7 aa, synthetic construct
TNRADAR

SEQ ID NO: 198658 - protein, 7 aa, synthetic construct
TRGPDSR

SEQ ID NO: 198659 - protein, 7 aa, synthetic construct
TGSHVSR

SEQ ID NO: 198660 - protein, 7 aa, synthetic construct
THRVQSA

SEQ ID NO: 198661 - protein, 7 aa, synthetic construct
KDRSDSR

SEQ ID NO: 198662 - protein, 7 aa, synthetic construct
TKYTDSR

SEQ ID NO: 198663 - protein, 7 aa, synthetic construct
TERVPNR

SEQ ID NO: 198664 - protein, 7 aa, synthetic construct
VGRVEMR

SEQ ID NO: 198665 - protein, 7 aa, synthetic construct
TGRMDKS

SEQ ID NO: 198666 - protein, 7 aa, synthetic construct
GGRVADR

SEQ ID NO: 198667 - protein, 7 aa, synthetic construct
TGRGASS

SEQ ID NO: 198668 - protein, 7 aa, synthetic construct
TLRNDSR

SEQ ID NO: 198669 - protein, 7 aa, synthetic construct
TGRTQER

SEQ ID NO: 198670 - protein, 7 aa, synthetic construct
TPRVQER

SEQ ID NO: 198671 - protein, 7 aa, synthetic construct
TDKVHSR

SEQ ID NO: 198672 - protein, 7 aa, synthetic construct
LGRADTR

SEQ ID NO: 198673 - protein, 7 aa, synthetic construct
MGRAESR

SEQ ID NO: 198674 - protein, 7 aa, synthetic construct
TGRNHSV

SEQ ID NO: 198675 - protein, 7 aa, synthetic construct
AGREGSR

SEQ ID NO: 198676 - protein, 7 aa, synthetic construct
TGNKDTR

SEQ ID NO: 198677 - protein, 7 aa, synthetic construct
QNRGDSR

SEQ ID NO: 198678 - protein, 7 aa, synthetic construct
VGRVDRI

SEQ ID NO: 198679 - protein, 7 aa, synthetic construct
TGRSETR

SEQ ID NO: 198680 - protein, 7 aa, synthetic construct
THTKDSR

SEQ ID NO: 198681 - protein, 7 aa, synthetic construct
IDRVTSR

SEQ ID NO: 198682 - protein, 7 aa, synthetic construct
TVRNDIR

SEQ ID NO: 198683 - protein, 7 aa, synthetic construct
IGRADLR

SEQ ID NO: 198684 - protein, 7 aa, synthetic construct
VGRVDRG

SEQ ID NO: 198685 - protein, 7 aa, synthetic construct
MHKVDSR

SEQ ID NO: 198686 - protein, 7 aa, synthetic construct
TKHVDIR

SEQ ID NO: 198687 - protein, 7 aa, synthetic construct
TQRAESR

SEQ ID NO: 198688 - protein, 7 aa, synthetic construct
TDRVLGR

SEQ ID NO: 198689 - protein, 7 aa, synthetic construct
TGRVHNV

SEQ ID NO: 198690 - protein, 7 aa, synthetic construct
TGRIDKF

SEQ ID NO: 198691 - protein, 7 aa, synthetic construct
KGRQDSV

SEQ ID NO: 198692 - protein, 7 aa, synthetic construct
TFKSDSR

SEQ ID NO: 198693 - protein, 7 aa, synthetic construct
TGRAEPR

SEQ ID NO: 198694 - protein, 7 aa, synthetic construct
TQRVTER

SEQ ID NO: 198695 - protein, 7 aa, synthetic construct
TGKFDPR

SEQ ID NO: 198696 - protein, 7 aa, synthetic construct
TGRGDRP

SEQ ID NO: 198697 - protein, 7 aa, synthetic construct
TGVHTSR

SEQ ID NO: 198698 - protein, 7 aa, synthetic construct
KDRVDVR

SEQ ID NO: 198699 - protein, 7 aa, synthetic construct
VGRVQSH

SEQ ID NO: 198700 - protein, 7 aa, synthetic construct
TGRMVDR

SEQ ID NO: 198701 - protein, 7 aa, synthetic construct
MSRVDSK

SEQ ID NO: 198702 - protein, 7 aa, synthetic construct
TKMLDSR

SEQ ID NO: 198703 - protein, 7 aa, synthetic construct
TGSIDKR

SEQ ID NO: 198704 - protein, 7 aa, synthetic construct
GGRVVER

SEQ ID NO: 198705 - protein, 7 aa, synthetic construct
THGVQSR

SEQ ID NO: 198706 - protein, 7 aa, synthetic construct
KRDVDSR

SEQ ID NO: 198707 - protein, 7 aa, synthetic construct
TTKMDSR

SEQ ID NO: 198708 - protein, 7 aa, synthetic construct
RGRVDQV

SEQ ID NO: 198709 - protein, 7 aa, synthetic construct
AGRVSSA

SEQ ID NO: 198710 - protein, 7 aa, synthetic construct
TERMASR

SEQ ID NO: 198711 - protein, 7 aa, synthetic construct
TGKQDNR

SEQ ID NO: 198712 - protein, 7 aa, synthetic construct
TGRVAHV

SEQ ID NO: 198713 - protein, 7 aa, synthetic construct
TGRPLDR

SEQ ID NO: 198714 - protein, 7 aa, synthetic construct
TDRNVSR

SEQ ID NO: 198715 - protein, 7 aa, synthetic construct
VGRVSSA

SEQ ID NO: 198716 - protein, 7 aa, synthetic construct
TGRSTDR

SEQ ID NO: 198717 - protein, 7 aa, synthetic construct
VGRVTSV

SEQ ID NO: 198718 - protein, 7 aa, synthetic construct
TDKVISR

SEQ ID NO: 198719 - protein, 7 aa, synthetic construct
TKRVESV

SEQ ID NO: 198720 - protein, 7 aa, synthetic construct
TGRKDNP

SEQ ID NO: 198721 - protein, 7 aa, synthetic construct
TERVTGR

SEQ ID NO: 198722 - protein, 7 aa, synthetic construct
TGRGQSN

SEQ ID NO: 198723 - protein, 7 aa, synthetic construct
TGVTDRR

SEQ ID NO: 198724 - protein, 7 aa, synthetic construct
TSRVETR

SEQ ID NO: 198725 - protein, 7 aa, synthetic construct
TGEVLKR

SEQ ID NO: 198726 - protein, 7 aa, synthetic construct
LPRVESR

SEQ ID NO: 198727 - protein, 7 aa, synthetic construct
TGKNDPR

SEQ ID NO: 198728 - protein, 7 aa, synthetic construct
LGRQDGR

SEQ ID NO: 198729 - protein, 7 aa, synthetic construct
LGRNDTR

SEQ ID NO: 198730 - protein, 7 aa, synthetic construct
QGRVDKG

SEQ ID NO: 198731 - protein, 7 aa, synthetic construct
LKRVDSG

SEQ ID NO: 198732 - protein, 7 aa, synthetic construct
VMRADSR

SEQ ID NO: 198733 - protein, 7 aa, synthetic construct
KDRVDLR

SEQ ID NO: 198734 - protein, 7 aa, synthetic construct
TKRVDGS

SEQ ID NO: 198735 - protein, 7 aa, synthetic construct
HGRVNSG

SEQ ID NO: 198736 - protein, 7 aa, synthetic construct
TTRVHSA

SEQ ID NO: 198737 - protein, 7 aa, synthetic construct
LRGVDSR

SEQ ID NO: 198738 - protein, 7 aa, synthetic construct
TKRQDSL

SEQ ID NO: 198739 - protein, 7 aa, synthetic construct
TIRVRSE

SEQ ID NO: 198740 - protein, 7 aa, synthetic construct
DGKVLSR

SEQ ID NO: 198741 - protein, 7 aa, synthetic construct
VGRTDVR

SEQ ID NO: 198742 - protein, 7 aa, synthetic construct
TDRTDKR

SEQ ID NO: 198743 - protein, 7 aa, synthetic construct
IPRVDAR

SEQ ID NO: 198744 - protein, 7 aa, synthetic construct
VPRVDQR

SEQ ID NO: 198745 - protein, 7 aa, synthetic construct
TTRVQDR

SEQ ID NO: 198746 - protein, 7 aa, synthetic construct
TGRVHPA

SEQ ID NO: 198747 - protein, 7 aa, synthetic construct
TGTHGSR

SEQ ID NO: 198748 - protein, 7 aa, synthetic construct
KGRTDST

SEQ ID NO: 198749 - protein, 7 aa, synthetic construct
TGRHISV

SEQ ID NO: 198750 - protein, 7 aa, synthetic construct
TGRNTSQ

SEQ ID NO: 198751 - protein, 7 aa, synthetic construct
TDRGLSR

SEQ ID NO: 198752 - protein, 7 aa, synthetic construct
TRQIDSR

SEQ ID NO: 198753 - protein, 7 aa, synthetic construct
TQHVSSR

SEQ ID NO: 198754 - protein, 7 aa, synthetic construct
LGRADIR

SEQ ID NO: 198755 - protein, 7 aa, synthetic construct
TGKVDKW

SEQ ID NO: 198756 - protein, 7 aa, synthetic construct
TGEVKHR

SEQ ID NO: 198757 - protein, 7 aa, synthetic construct
TGRVSLN

SEQ ID NO: 198758 - protein, 7 aa, synthetic construct
QGRVDLR

SEQ ID NO: 198759 - protein, 7 aa, synthetic construct
TGDIKSR

SEQ ID NO: 198760 - protein, 7 aa, synthetic construct
TMRVTDR

SEQ ID NO: 198761 - protein, 7 aa, synthetic construct
TINVDKR

SEQ ID NO: 198762 - protein, 7 aa, synthetic construct
TERVDKR

SEQ ID NO: 198763 - protein, 7 aa, synthetic construct
TYRVKSE

SEQ ID NO: 198764 - protein, 7 aa, synthetic construct
TGRGDKI

SEQ ID NO: 198765 - protein, 7 aa, synthetic construct
TARTDGR

SEQ ID NO: 198766 - protein, 7 aa, synthetic construct
RGGVESR

SEQ ID NO: 198767 - protein, 7 aa, synthetic construct
TERVAAR

SEQ ID NO: 198768 - protein, 7 aa, synthetic construct
TGRNASG

SEQ ID NO: 198769 - protein, 7 aa, synthetic construct
DGKVNSR

SEQ ID NO: 198770 - protein, 7 aa, synthetic construct
TGRVLHN

SEQ ID NO: 198771 - protein, 7 aa, synthetic construct
NFKVDSR

SEQ ID NO: 198772 - protein, 7 aa, synthetic construct
DGRVRSI

SEQ ID NO: 198773 - protein, 7 aa, synthetic construct
TGREDKK

SEQ ID NO: 198774 - protein, 7 aa, synthetic construct
TSRVEIR

SEQ ID NO: 198775 - protein, 7 aa, synthetic construct
TGRPDKY

SEQ ID NO: 198776 - protein, 7 aa, synthetic construct
SSRVDGR

SEQ ID NO: 198777 - protein, 7 aa, synthetic construct
TSRSDGR

SEQ ID NO: 198778 - protein, 7 aa, synthetic construct
TGRDKSL

SEQ ID NO: 198779 - protein, 7 aa, synthetic construct
TGEKPSR

SEQ ID NO: 198780 - protein, 7 aa, synthetic construct
TIKNDSR

SEQ ID NO: 198781 - protein, 7 aa, synthetic construct
GGAKDSR

SEQ ID NO: 198782 - protein, 7 aa, synthetic construct
DGKVTSR

SEQ ID NO: 198783 - protein, 7 aa, synthetic construct
QTRTDSR

SEQ ID NO: 198784 - protein, 7 aa, synthetic construct
TGRVELR

SEQ ID NO: 198785 - protein, 7 aa, synthetic construct
TGKTDGR

SEQ ID NO: 198786 - protein, 7 aa, synthetic construct
TNRNDSK

SEQ ID NO: 198787 - protein, 7 aa, synthetic construct
IGRVVSQ

SEQ ID NO: 198788 - protein, 7 aa, synthetic construct
FGPVDKR

SEQ ID NO: 198789 - protein, 7 aa, synthetic construct
VGRVASQ

SEQ ID NO: 198790 - protein, 7 aa, synthetic construct
TGPVEKR

SEQ ID NO: 198791 - protein, 7 aa, synthetic construct
TDRVPLR

SEQ ID NO: 198792 - protein, 7 aa, synthetic construct
MARGDSR

SEQ ID NO: 198793 - protein, 7 aa, synthetic construct
TKYVDSK

SEQ ID NO: 198794 - protein, 7 aa, synthetic construct
IGQKDSR

SEQ ID NO: 198795 - protein, 7 aa, synthetic construct
TGRQDAK

SEQ ID NO: 198796 - protein, 7 aa, synthetic construct
LGRVISM

SEQ ID NO: 198797 - protein, 7 aa, synthetic construct
TGRVKDA

SEQ ID NO: 198798 - protein, 7 aa, synthetic construct
MSRGDSR

SEQ ID NO: 198799 - protein, 7 aa, synthetic construct
TKRTDSG

SEQ ID NO: 198800 - protein, 7 aa, synthetic construct
TGRETNR

SEQ ID NO: 198801 - protein, 7 aa, synthetic construct
KMGVDSR

SEQ ID NO: 198802 - protein, 7 aa, synthetic construct
RGAVDAR

SEQ ID NO: 198803 - protein, 7 aa, synthetic construct
TGRSADR

SEQ ID NO: 198804 - protein, 7 aa, synthetic construct
VGRSDAR

SEQ ID NO: 198805 - protein, 7 aa, synthetic construct
QGRVDKV

SEQ ID NO: 198806 - protein, 7 aa, synthetic construct
YNRVESR

SEQ ID NO: 198807 - protein, 7 aa, synthetic construct
TNRVTER

SEQ ID NO: 198808 - protein, 7 aa, synthetic construct
TGRVEKG

SEQ ID NO: 198809 - protein, 7 aa, synthetic construct
DKRTDSR

SEQ ID NO: 198810 - protein, 7 aa, synthetic construct
TGPVHSK

SEQ ID NO: 198811 - protein, 7 aa, synthetic construct
MARVDVR

SEQ ID NO: 198812 - protein, 7 aa, synthetic construct
LNRVESR

SEQ ID NO: 198813 - protein, 7 aa, synthetic construct
TGPHASR

SEQ ID NO: 198814 - protein, 7 aa, synthetic construct
TLRGESR

SEQ ID NO: 198815 - protein, 7 aa, synthetic construct
TGRISER

SEQ ID NO: 198816 - protein, 7 aa, synthetic construct
TGRMHSG

SEQ ID NO: 198817 - protein, 7 aa, synthetic construct
TGGKDAR

SEQ ID NO: 198818 - protein, 7 aa, synthetic construct
TGFKDNR

SEQ ID NO: 198819 - protein, 7 aa, synthetic construct
IGKVDGR

SEQ ID NO: 198820 - protein, 7 aa, synthetic construct
TQRVPDR

SEQ ID NO: 198821 - protein, 7 aa, synthetic construct
TIRVDKQ

SEQ ID NO: 198822 - protein, 7 aa, synthetic construct
LTRQDSR

SEQ ID NO: 198823 - protein, 7 aa, synthetic construct
TGRVKDI

SEQ ID NO: 198824 - protein, 7 aa, synthetic construct
VGRSDIR

SEQ ID NO: 198825 - protein, 7 aa, synthetic construct
THRVTSM

SEQ ID NO: 198826 - protein, 7 aa, synthetic construct
QGRVRSE

SEQ ID NO: 198827 - protein, 7 aa, synthetic construct
SGDVKSR

SEQ ID NO: 198828 - protein, 7 aa, synthetic construct
DKRVDSK

SEQ ID NO: 198829 - protein, 7 aa, synthetic construct
GGRKDSV

SEQ ID NO: 198830 - protein, 7 aa, synthetic construct
LGRVHSS

SEQ ID NO: 198831 - protein, 7 aa, synthetic construct
THKVESR

SEQ ID NO: 198832 - protein, 7 aa, synthetic construct
QPRVDAR

SEQ ID NO: 198833 - protein, 7 aa, synthetic construct
TGRPESR

SEQ ID NO: 198834 - protein, 7 aa, synthetic construct
QVRADSR

SEQ ID NO: 198835 - protein, 7 aa, synthetic construct
LGRVDKG

SEQ ID NO: 198836 - protein, 7 aa, synthetic construct
TGKSDGR

SEQ ID NO: 198837 - protein, 7 aa, synthetic construct
TQRKDSV

SEQ ID NO: 198838 - protein, 7 aa, synthetic construct
TGRQESR

SEQ ID NO: 198839 - protein, 7 aa, synthetic construct
TGRHASV

SEQ ID NO: 198840 - protein, 7 aa, synthetic construct
IIRNDSR

SEQ ID NO: 198841 - protein, 7 aa, synthetic construct
LGKFDSR

SEQ ID NO: 198842 - protein, 7 aa, synthetic construct
TSREVSR

SEQ ID NO: 198843 - protein, 7 aa, synthetic construct
FGGKDSR

SEQ ID NO: 198844 - protein, 7 aa, synthetic construct
LGSVDKR

SEQ ID NO: 198845 - protein, 7 aa, synthetic construct
TGRKDLI

SEQ ID NO: 198846 - protein, 7 aa, synthetic construct
TGRKDII

SEQ ID NO: 198847 - protein, 7 aa, synthetic construct
MDRKDSR

SEQ ID NO: 198848 - protein, 7 aa, synthetic construct
TGRMSSI

SEQ ID NO: 198849 - protein, 7 aa, synthetic construct
TERVRSG

SEQ ID NO: 198850 - protein, 7 aa, synthetic construct
TGRNDAK

SEQ ID NO: 198851 - protein, 7 aa, synthetic construct
TGTKDYR

SEQ ID NO: 198852 - protein, 7 aa, synthetic construct
TGDVMRR

SEQ ID NO: 198853 - protein, 7 aa, synthetic construct
TSRVDKT

SEQ ID NO: 198854 - protein, 7 aa, synthetic construct
AGKGDSR

SEQ ID NO: 198855 - protein, 7 aa, synthetic construct
RGSIDSR

SEQ ID NO: 198856 - protein, 7 aa, synthetic construct
TRNVDMR

SEQ ID NO: 198857 - protein, 7 aa, synthetic construct
TGKDDRR

SEQ ID NO: 198858 - protein, 7 aa, synthetic construct
TGREAPR

SEQ ID NO: 198859 - protein, 7 aa, synthetic construct
QPRVDPR

SEQ ID NO: 198860 - protein, 7 aa, synthetic construct
TTRGDQR

SEQ ID NO: 198861 - protein, 7 aa, synthetic construct
TGRSDSK

SEQ ID NO: 198862 - protein, 7 aa, synthetic construct
LGRGDSK

SEQ ID NO: 198863 - protein, 7 aa, synthetic construct
TGRPTSQ

SEQ ID NO: 198864 - protein, 7 aa, synthetic construct
TERVVPR

SEQ ID NO: 198865 - protein, 7 aa, synthetic construct
VGSVDKR

SEQ ID NO: 198866 - protein, 7 aa, synthetic construct
QGRVMSL

SEQ ID NO: 198867 - protein, 7 aa, synthetic construct
IGRQDLR

SEQ ID NO: 198868 - protein, 7 aa, synthetic construct
KGGVDTR

SEQ ID NO: 198869 - protein, 7 aa, synthetic construct
VGRVEAR

SEQ ID NO: 198870 - protein, 7 aa, synthetic construct
TERQLSR

SEQ ID NO: 198871 - protein, 7 aa, synthetic construct
LGRVHSG

SEQ ID NO: 198872 - protein, 7 aa, synthetic construct
HGKVDPR

SEQ ID NO: 198873 - protein, 7 aa, synthetic construct
TDRVSGR

SEQ ID NO: 198874 - protein, 7 aa, synthetic construct
TGERQSR

SEQ ID NO: 198875 - protein, 7 aa, synthetic construct
TIRVHSG

SEQ ID NO: 198876 - protein, 7 aa, synthetic construct
MGREVSR

SEQ ID NO: 198877 - protein, 7 aa, synthetic construct
TGRGSSL

SEQ ID NO: 198878 - protein, 7 aa, synthetic construct
LGRVTSA

SEQ ID NO: 198879 - protein, 7 aa, synthetic construct
TGRQTSS

SEQ ID NO: 198880 - protein, 7 aa, synthetic construct
TKRVDAM

SEQ ID NO: 198881 - protein, 7 aa, synthetic construct
MGRVISH

SEQ ID NO: 198882 - protein, 7 aa, synthetic construct
MGRVEAR

SEQ ID NO: 198883 - protein, 7 aa, synthetic construct
LGRVSST

SEQ ID NO: 198884 - protein, 7 aa, synthetic construct
VGRVELR

SEQ ID NO: 198885 - protein, 7 aa, synthetic construct
TGKVFSN

SEQ ID NO: 198886 - protein, 7 aa, synthetic construct
TGRESGR

SEQ ID NO: 198887 - protein, 7 aa, synthetic construct
YGRVENR

SEQ ID NO: 198888 - protein, 7 aa, synthetic construct
TFSKDSR

SEQ ID NO: 198889 - protein, 7 aa, synthetic construct
NERVVSR

SEQ ID NO: 198890 - protein, 7 aa, synthetic construct
TGRNISL

SEQ ID NO: 198891 - protein, 7 aa, synthetic construct
TERVRSN

SEQ ID NO: 198892 - protein, 7 aa, synthetic construct
TERVQQR

SEQ ID NO: 198893 - protein, 7 aa, synthetic construct
FGRVASA

SEQ ID NO: 198894 - protein, 7 aa, synthetic construct
LTRTDSR

SEQ ID NO: 198895 - protein, 7 aa, synthetic construct
THRVSSA

SEQ ID NO: 198896 - protein, 7 aa, synthetic construct
QGRVISS

SEQ ID NO: 198897 - protein, 7 aa, synthetic construct
TNRVDKT

SEQ ID NO: 198898 - protein, 7 aa, synthetic construct
TNRVVER

SEQ ID NO: 198899 - protein, 7 aa, synthetic construct
TQFKDSR

SEQ ID NO: 198900 - protein, 7 aa, synthetic construct
TGRVTHN

SEQ ID NO: 198901 - protein, 7 aa, synthetic construct
TGEVKSR

SEQ ID NO: 198902 - protein, 7 aa, synthetic construct
KGRVDAS

SEQ ID NO: 198903 - protein, 7 aa, synthetic construct
TSRTDQR

SEQ ID NO: 198904 - protein, 7 aa, synthetic construct
TSRVAER

SEQ ID NO: 198905 - protein, 7 aa, synthetic construct
TGRVSNL

SEQ ID NO: 198906 - protein, 7 aa, synthetic construct
YTKVDSR

SEQ ID NO: 198907 - protein, 7 aa, synthetic construct
VQRVDVR

SEQ ID NO: 198908 - protein, 7 aa, synthetic construct
MERVNSR

SEQ ID NO: 198909 - protein, 7 aa, synthetic construct
RGDVSSR

SEQ ID NO: 198910 - protein, 7 aa, synthetic construct
MGRVTSH

SEQ ID NO: 198911 - protein, 7 aa, synthetic construct
TQRVHSN

SEQ ID NO: 198912 - protein, 7 aa, synthetic construct
TNRNDAR

SEQ ID NO: 198913 - protein, 7 aa, synthetic construct
VKRDDSR

SEQ ID NO: 198914 - protein, 7 aa, synthetic construct
TDRALSR

SEQ ID NO: 198915 - protein, 7 aa, synthetic construct
MGRVTER

SEQ ID NO: 198916 - protein, 7 aa, synthetic construct
TRQVDSK

SEQ ID NO: 198917 - protein, 7 aa, synthetic construct
YGRVVSN

SEQ ID NO: 198918 - protein, 7 aa, synthetic construct
VGRVDKP

SEQ ID NO: 198919 - protein, 7 aa, synthetic construct
TPRKDST

SEQ ID NO: 198920 - protein, 7 aa, synthetic construct
MGKVDMR

SEQ ID NO: 198921 - protein, 7 aa, synthetic construct
RNRVDSP

SEQ ID NO: 198922 - protein, 7 aa, synthetic construct
TGRASSQ

SEQ ID NO: 198923 - protein, 7 aa, synthetic construct
TRTQDSR

SEQ ID NO: 198924 - protein, 7 aa, synthetic construct
VNRVDLR

SEQ ID NO: 198925 - protein, 7 aa, synthetic construct
LGRVSSN

SEQ ID NO: 198926 - protein, 7 aa, synthetic construct
TGRNVER

SEQ ID NO: 198927 - protein, 7 aa, synthetic construct
THRVDKS

SEQ ID NO: 198928 - protein, 7 aa, synthetic construct
TGKKDSY

SEQ ID NO: 198929 - protein, 7 aa, synthetic construct
SGRVENR

SEQ ID NO: 198930 - protein, 7 aa, synthetic construct
TGRVQDR

SEQ ID NO: 198931 - protein, 7 aa, synthetic construct
QGRVVSG

SEQ ID NO: 198932 - protein, 7 aa, synthetic construct
TGRGTSL

SEQ ID NO: 198933 - protein, 7 aa, synthetic construct
KGRSDSG

SEQ ID NO: 198934 - protein, 7 aa, synthetic construct
VARMDSR

SEQ ID NO: 198935 - protein, 7 aa, synthetic construct
TGRVHVN

SEQ ID NO: 198936 - protein, 7 aa, synthetic construct
TGKVYSM

SEQ ID NO: 198937 - protein, 7 aa, synthetic construct
KGKDDSR

SEQ ID NO: 198938 - protein, 7 aa, synthetic construct
IGREQSR

SEQ ID NO: 198939 - protein, 7 aa, synthetic construct
DGRVGAR

SEQ ID NO: 198940 - protein, 7 aa, synthetic construct
TGRQDKN

SEQ ID NO: 198941 - protein, 7 aa, synthetic construct
TKRQDSM

SEQ ID NO: 198942 - protein, 7 aa, synthetic construct
TGRNEAR

SEQ ID NO: 198943 - protein, 7 aa, synthetic construct
TGKGDFR

SEQ ID NO: 198944 - protein, 7 aa, synthetic construct
TERVQPR

SEQ ID NO: 198945 - protein, 7 aa, synthetic construct
TGDVGRR

SEQ ID NO: 198946 - protein, 7 aa, synthetic construct
TGREQGR

SEQ ID NO: 198947 - protein, 7 aa, synthetic construct
GGRTDAR

SEQ ID NO: 198948 - protein, 7 aa, synthetic construct
VARVDGR

SEQ ID NO: 198949 - protein, 7 aa, synthetic construct
IGRVDNK

SEQ ID NO: 198950 - protein, 7 aa, synthetic construct
LNRVDSR

SEQ ID NO: 198951 - protein, 7 aa, synthetic construct
TDRVRSQ

SEQ ID NO: 198952 - protein, 7 aa, synthetic construct
TNRKDSS

SEQ ID NO: 198953 - protein, 7 aa, synthetic construct
GRGVDSR

SEQ ID NO: 198954 - protein, 7 aa, synthetic construct
TGRMDKN

SEQ ID NO: 198955 - protein, 7 aa, synthetic construct
TDVVKSR

SEQ ID NO: 198956 - protein, 7 aa, synthetic construct
TGRELNR

SEQ ID NO: 198957 - protein, 7 aa, synthetic construct
AGKMDSR

SEQ ID NO: 198958 - protein, 7 aa, synthetic construct
TGRNVSA

SEQ ID NO: 198959 - protein, 7 aa, synthetic construct
TGRKDGT

SEQ ID NO: 198960 - protein, 7 aa, synthetic construct
VGKGDSR

SEQ ID NO: 198961 - protein, 7 aa, synthetic construct
TKNIDSR

SEQ ID NO: 198962 - protein, 7 aa, synthetic construct
TGRQTER

SEQ ID NO: 198963 - protein, 7 aa, synthetic construct
TSNRDSR

SEQ ID NO: 198964 - protein, 7 aa, synthetic construct
TGRPISQ

SEQ ID NO: 198965 - protein, 7 aa, synthetic construct
TGRGEMR

SEQ ID NO: 198966 - protein, 7 aa, synthetic construct
LGTVDKR

SEQ ID NO: 198967 - protein, 7 aa, synthetic construct
TKDVHSR

SEQ ID NO: 198968 - protein, 7 aa, synthetic construct
TGRVERN

SEQ ID NO: 198969 - protein, 7 aa, synthetic construct
KGDVSSR

SEQ ID NO: 198970 - protein, 7 aa, synthetic construct
TGKSESR

SEQ ID NO: 198971 - protein, 7 aa, synthetic construct
TGKGDGR

SEQ ID NO: 198972 - protein, 7 aa, synthetic construct
TGRSSDR

SEQ ID NO: 198973 - protein, 7 aa, synthetic construct
VGRVDRA

SEQ ID NO: 198974 - protein, 7 aa, synthetic construct
AGKVDSR

SEQ ID NO: 198975 - protein, 7 aa, synthetic construct
KGRVDGS

SEQ ID NO: 198976 - protein, 7 aa, synthetic construct
TGKSDQR

SEQ ID NO: 198977 - protein, 7 aa, synthetic construct
QSRVESR

SEQ ID NO: 198978 - protein, 7 aa, synthetic construct
FARPDSR

SEQ ID NO: 198979 - protein, 7 aa, synthetic construct
TGREKSI

SEQ ID NO: 198980 - protein, 7 aa, synthetic construct
TARVKSE

SEQ ID NO: 198981 - protein, 7 aa, synthetic construct
QTRGDSR

SEQ ID NO: 198982 - protein, 7 aa, synthetic construct
TKHPDSR

SEQ ID NO: 198983 - protein, 7 aa, synthetic construct
MGGKDSR

SEQ ID NO: 198984 - protein, 7 aa, synthetic construct
TGRVSSA

SEQ ID NO: 198985 - protein, 7 aa, synthetic construct
TGERPSR

SEQ ID NO: 198986 - protein, 7 aa, synthetic construct
IGRVDKL

SEQ ID NO: 198987 - protein, 7 aa, synthetic construct
TGRMDSK

SEQ ID NO: 198988 - protein, 7 aa, synthetic construct
TERQISR

SEQ ID NO: 198989 - protein, 7 aa, synthetic construct
TSRVVSH

SEQ ID NO: 198990 - protein, 7 aa, synthetic construct
AKRVDSV

SEQ ID NO: 198991 - protein, 7 aa, synthetic construct
TGGVHGR

SEQ ID NO: 198992 - protein, 7 aa, synthetic construct
TGKRDSG

SEQ ID NO: 198993 - protein, 7 aa, synthetic construct
TGRNELR

SEQ ID NO: 198994 - protein, 7 aa, synthetic construct
LGRVHSQ

SEQ ID NO: 198995 - protein, 7 aa, synthetic construct
IGRDISR

SEQ ID NO: 198996 - protein, 7 aa, synthetic construct
MGRVTSI

SEQ ID NO: 198997 - protein, 7 aa, synthetic construct
TGRPSSS

SEQ ID NO: 198998 - protein, 7 aa, synthetic construct
QGRGDIR

SEQ ID NO: 198999 - protein, 7 aa, synthetic construct
TGRVSKD

SEQ ID NO: 199000 - protein, 7 aa, synthetic construct
TSRVLER

SEQ ID NO: 199001 - protein, 7 aa, synthetic construct
KYSVDSR

SEQ ID NO: 199002 - protein, 7 aa, synthetic construct
KGRVESF

SEQ ID NO: 199003 - protein, 7 aa, synthetic construct
YARVDSK

SEQ ID NO: 199004 - protein, 7 aa, synthetic construct
TKREDGR

SEQ ID NO: 199005 - protein, 7 aa, synthetic construct
DKRVESR

SEQ ID NO: 199006 - protein, 7 aa, synthetic construct
IGAKDSR

SEQ ID NO: 199007 - protein, 7 aa, synthetic construct
GTRVDAR

SEQ ID NO: 199008 - protein, 7 aa, synthetic construct
TGRIDKG

SEQ ID NO: 199009 - protein, 7 aa, synthetic construct
AGRVDKL

SEQ ID NO: 199010 - protein, 7 aa, synthetic construct
TTRNDQR

SEQ ID NO: 199011 - protein, 7 aa, synthetic construct
ITRVDAR

SEQ ID NO: 199012 - protein, 7 aa, synthetic construct
TGRVAHN

SEQ ID NO: 199013 - protein, 7 aa, synthetic construct
TGGGDRR

SEQ ID NO: 199014 - protein, 7 aa, synthetic construct
GARVDNR

SEQ ID NO: 199015 - protein, 7 aa, synthetic construct
TDRVSMR

SEQ ID NO: 199016 - protein, 7 aa, synthetic construct
TGRKDVF

SEQ ID NO: 199017 - protein, 7 aa, synthetic construct
TGRKLSE

SEQ ID NO: 199018 - protein, 7 aa, synthetic construct
TGRLDNR

SEQ ID NO: 199019 - protein, 7 aa, synthetic construct
YGKADSR

SEQ ID NO: 199020 - protein, 7 aa, synthetic construct
TGRNESK

SEQ ID NO: 199021 - protein, 7 aa, synthetic construct
GSRVDLR

SEQ ID NO: 199022 - protein, 7 aa, synthetic construct
TGEVRAR

SEQ ID NO: 199023 - protein, 7 aa, synthetic construct
TSGRDSR

SEQ ID NO: 199024 - protein, 7 aa, synthetic construct
VGRVESK

SEQ ID NO: 199025 - protein, 7 aa, synthetic construct
TSRVDGR

SEQ ID NO: 199026 - protein, 7 aa, synthetic construct
TDRVASK

SEQ ID NO: 199027 - protein, 7 aa, synthetic construct
QGRVDKQ

SEQ ID NO: 199028 - protein, 7 aa, synthetic construct
TGTHSSR

SEQ ID NO: 199029 - protein, 7 aa, synthetic construct
TKRVDIS

SEQ ID NO: 199030 - protein, 7 aa, synthetic construct
TKRVDNV

SEQ ID NO: 199031 - protein, 7 aa, synthetic construct
TERVSLR

SEQ ID NO: 199032 - protein, 7 aa, synthetic construct
AGKQDSR

SEQ ID NO: 199033 - protein, 7 aa, synthetic construct
HGKVESR

SEQ ID NO: 199034 - protein, 7 aa, synthetic construct
AVRADSR

SEQ ID NO: 199035 - protein, 7 aa, synthetic construct
RSNVDSR

SEQ ID NO: 199036 - protein, 7 aa, synthetic construct
TDRVSSK

SEQ ID NO: 199037 - protein, 7 aa, synthetic construct
RGSTDSR

SEQ ID NO: 199038 - protein, 7 aa, synthetic construct
TGRKDGL

SEQ ID NO: 199039 - protein, 7 aa, synthetic construct
TGRNHSA

SEQ ID NO: 199040 - protein, 7 aa, synthetic construct
QGRVDKP

SEQ ID NO: 199041 - protein, 7 aa, synthetic construct
TGRHVSV

SEQ ID NO: 199042 - protein, 7 aa, synthetic construct
KGRVDIT

SEQ ID NO: 199043 - protein, 7 aa, synthetic construct
VGRNDSK

SEQ ID NO: 199044 - protein, 7 aa, synthetic construct
TGRVTKD

SEQ ID NO: 199045 - protein, 7 aa, synthetic construct
TERSTSR

SEQ ID NO: 199046 - protein, 7 aa, synthetic construct
IGRVNER

SEQ ID NO: 199047 - protein, 7 aa, synthetic construct
RGDVDKR

SEQ ID NO: 199048 - protein, 7 aa, synthetic construct
QSRGDSR

SEQ ID NO: 199049 - protein, 7 aa, synthetic construct
TDKKDSR

SEQ ID NO: 199050 - protein, 7 aa, synthetic construct
MSRVDNR

SEQ ID NO: 199051 - protein, 7 aa, synthetic construct
KDRNDSR

SEQ ID NO: 199052 - protein, 7 aa, synthetic construct
AGRVISA

SEQ ID NO: 199053 - protein, 7 aa, synthetic construct
KGRVDGM

SEQ ID NO: 199054 - protein, 7 aa, synthetic construct
TGSVHSR

SEQ ID NO: 199055 - protein, 7 aa, synthetic construct
VPRGDSR

SEQ ID NO: 199056 - protein, 7 aa, synthetic construct
TGKMESR

SEQ ID NO: 199057 - protein, 7 aa, synthetic construct
MGRVDGK

SEQ ID NO: 199058 - protein, 7 aa, synthetic construct
KGRVDVN

SEQ ID NO: 199059 - protein, 7 aa, synthetic construct
TGGVGGR

SEQ ID NO: 199060 - protein, 7 aa, synthetic construct
TGRVGHA

SEQ ID NO: 199061 - protein, 7 aa, synthetic construct
LGRVDSK

SEQ ID NO: 199062 - protein, 7 aa, synthetic construct
IGRVEPR

SEQ ID NO: 199063 - protein, 7 aa, synthetic construct
GGREISR

SEQ ID NO: 199064 - protein, 7 aa, synthetic construct
DGVVKSR

SEQ ID NO: 199065 - protein, 7 aa, synthetic construct
TGRQLDR

SEQ ID NO: 199066 - protein, 7 aa, synthetic construct
TTRVAER

SEQ ID NO: 199067 - protein, 7 aa, synthetic construct
IGRVDLK

SEQ ID NO: 199068 - protein, 7 aa, synthetic construct
KGRVLSE

SEQ ID NO: 199069 - protein, 7 aa, synthetic construct
TKRVDNA

SEQ ID NO: 199070 - protein, 7 aa, synthetic construct
DTRVGSR

SEQ ID NO: 199071 - protein, 7 aa, synthetic construct
TERVMQR

SEQ ID NO: 199072 - protein, 7 aa, synthetic construct
MGRVDKV

SEQ ID NO: 199073 - protein, 7 aa, synthetic construct
TKRVDTM

SEQ ID NO: 199074 - protein, 7 aa, synthetic construct
QDRVGSR

SEQ ID NO: 199075 - protein, 7 aa, synthetic construct
TSRVDSK

SEQ ID NO: 199076 - protein, 7 aa, synthetic construct
VGRVVER

SEQ ID NO: 199077 - protein, 7 aa, synthetic construct
KGIVDPR

SEQ ID NO: 199078 - protein, 7 aa, synthetic construct
MIRSDSR

SEQ ID NO: 199079 - protein, 7 aa, synthetic construct
TSRVHSI

SEQ ID NO: 199080 - protein, 7 aa, synthetic construct
VGRVTSM

SEQ ID NO: 199081 - protein, 7 aa, synthetic construct
TGDMKSR

SEQ ID NO: 199082 - protein, 7 aa, synthetic construct
LGRKDSM

SEQ ID NO: 199083 - protein, 7 aa, synthetic construct
TDRMPSR

SEQ ID NO: 199084 - protein, 7 aa, synthetic construct
TVRSDNR

SEQ ID NO: 199085 - protein, 7 aa, synthetic construct
TQRVDKS

SEQ ID NO: 199086 - protein, 7 aa, synthetic construct
TDRPASR

SEQ ID NO: 199087 - protein, 7 aa, synthetic construct
TGRVKDM

SEQ ID NO: 199088 - protein, 7 aa, synthetic construct
MGRVQDR

SEQ ID NO: 199089 - protein, 7 aa, synthetic construct
RGSVDGR

SEQ ID NO: 199090 - protein, 7 aa, synthetic construct
TGRVDKY

SEQ ID NO: 199091 - protein, 7 aa, synthetic construct
TKRGDSV

SEQ ID NO: 199092 - protein, 7 aa, synthetic construct
MQRVESR

SEQ ID NO: 199093 - protein, 7 aa, synthetic construct
AGRVSER

SEQ ID NO: 199094 - protein, 7 aa, synthetic construct
ISRVDAR

SEQ ID NO: 199095 - protein, 7 aa, synthetic construct
IGHVTSR

SEQ ID NO: 199096 - protein, 7 aa, synthetic construct
TGRIEVR

SEQ ID NO: 199097 - protein, 7 aa, synthetic construct
KGRIDSG

SEQ ID NO: 199098 - protein, 7 aa, synthetic construct
TGRQMER

SEQ ID NO: 199099 - protein, 7 aa, synthetic construct
TGHTNSR

SEQ ID NO: 199100 - protein, 7 aa, synthetic construct
RGSVDPR

SEQ ID NO: 199101 - protein, 7 aa, synthetic construct
MGRADVR

SEQ ID NO: 199102 - protein, 7 aa, synthetic construct
TSREDKR

SEQ ID NO: 199103 - protein, 7 aa, synthetic construct
TGRTHSG

SEQ ID NO: 199104 - protein, 7 aa, synthetic construct
TGRVHGG

SEQ ID NO: 199105 - protein, 7 aa, synthetic construct
TSKSDSR

SEQ ID NO: 199106 - protein, 7 aa, synthetic construct
TGRVHNM

SEQ ID NO: 199107 - protein, 7 aa, synthetic construct
TGRVRET

SEQ ID NO: 199108 - protein, 7 aa, synthetic construct
DKRVDMR

SEQ ID NO: 199109 - protein, 7 aa, synthetic construct
TGRADRN

SEQ ID NO: 199110 - protein, 7 aa, synthetic construct
TGRNDIR

SEQ ID NO: 199111 - protein, 7 aa, synthetic construct
VGRQDNR

SEQ ID NO: 199112 - protein, 7 aa, synthetic construct
VGRVVSG

SEQ ID NO: 199113 - protein, 7 aa, synthetic construct
VGRVGER

SEQ ID NO: 199114 - protein, 7 aa, synthetic construct
TGRVHMG

SEQ ID NO: 199115 - protein, 7 aa, synthetic construct
TMRGESR

SEQ ID NO: 199116 - protein, 7 aa, synthetic construct
TIRNDAR

SEQ ID NO: 199117 - protein, 7 aa, synthetic construct
IPRSDSR

SEQ ID NO: 199118 - protein, 7 aa, synthetic construct
THRVNSA

SEQ ID NO: 199119 - protein, 7 aa, synthetic construct
VQKVDSR

SEQ ID NO: 199120 - protein, 7 aa, synthetic construct
IIRGDSR

SEQ ID NO: 199121 - protein, 7 aa, synthetic construct
LGRIDAR

SEQ ID NO: 199122 - protein, 7 aa, synthetic construct
HPRVDAR

SEQ ID NO: 199123 - protein, 7 aa, synthetic construct
KGRVDTI

SEQ ID NO: 199124 - protein, 7 aa, synthetic construct
TGRKDLA

SEQ ID NO: 199125 - protein, 7 aa, synthetic construct
VGRVTSN

SEQ ID NO: 199126 - protein, 7 aa, synthetic construct
IGRVSST

SEQ ID NO: 199127 - protein, 7 aa, synthetic construct
KPRVDSQ

SEQ ID NO: 199128 - protein, 7 aa, synthetic construct
LGRVQSH

SEQ ID NO: 199129 - protein, 7 aa, synthetic construct
IGRVDKA

SEQ ID NO: 199130 - protein, 7 aa, synthetic construct
QGRVDIR

SEQ ID NO: 199131 - protein, 7 aa, synthetic construct
RGKVDER

SEQ ID NO: 199132 - protein, 7 aa, synthetic construct
LSRNDSR

SEQ ID NO: 199133 - protein, 7 aa, synthetic construct
KGGVDGR

SEQ ID NO: 199134 - protein, 7 aa, synthetic construct
TGRNDKA

SEQ ID NO: 199135 - protein, 7 aa, synthetic construct
LGRVTDR

SEQ ID NO: 199136 - protein, 7 aa, synthetic construct
YGRVLSG

SEQ ID NO: 199137 - protein, 7 aa, synthetic construct
TDRVISK

SEQ ID NO: 199138 - protein, 7 aa, synthetic construct
LGRVSSG

SEQ ID NO: 199139 - protein, 7 aa, synthetic construct
TGRLHSG

SEQ ID NO: 199140 - protein, 7 aa, synthetic construct
TNRPDLR

SEQ ID NO: 199141 - protein, 7 aa, synthetic construct
MSRVDAR

SEQ ID NO: 199142 - protein, 7 aa, synthetic construct
TGNVDRR

SEQ ID NO: 199143 - protein, 7 aa, synthetic construct
TGRADRI

SEQ ID NO: 199144 - protein, 7 aa, synthetic construct
YGRVTSN

SEQ ID NO: 199145 - protein, 7 aa, synthetic construct
KGSMDSR

SEQ ID NO: 199146 - protein, 7 aa, synthetic construct
TGRSDIR

SEQ ID NO: 199147 - protein, 7 aa, synthetic construct
LGRVHSA

SEQ ID NO: 199148 - protein, 7 aa, synthetic construct
TKNPDSR

SEQ ID NO: 199149 - protein, 7 aa, synthetic construct
MGRVSDR

SEQ ID NO: 199150 - protein, 7 aa, synthetic construct
TKRVDFG

SEQ ID NO: 199151 - protein, 7 aa, synthetic construct
GGRVDKF

SEQ ID NO: 199152 - protein, 7 aa, synthetic construct
TGRTHSV

SEQ ID NO: 199153 - protein, 7 aa, synthetic construct
TGAVDKR

SEQ ID NO: 199154 - protein, 7 aa, synthetic construct
TDRAGSR

SEQ ID NO: 199155 - protein, 7 aa, synthetic construct
TGRNSSM

SEQ ID NO: 199156 - protein, 7 aa, synthetic construct
TGGHTSR

SEQ ID NO: 199157 - protein, 7 aa, synthetic construct
TGRNENR

SEQ ID NO: 199158 - protein, 7 aa, synthetic construct
AGRGDLR

SEQ ID NO: 199159 - protein, 7 aa, synthetic construct
TTRSESR

SEQ ID NO: 199160 - protein, 7 aa, synthetic construct
KGFVDSK

SEQ ID NO: 199161 - protein, 7 aa, synthetic construct
TYDVKSR

SEQ ID NO: 199162 - protein, 7 aa, synthetic construct
TMRQESR

SEQ ID NO: 199163 - protein, 7 aa, synthetic construct
LGRAESR

SEQ ID NO: 199164 - protein, 7 aa, synthetic construct
TGRADKV

SEQ ID NO: 199165 - protein, 7 aa, synthetic construct
QPRVDSR

SEQ ID NO: 199166 - protein, 7 aa, synthetic construct
TGTVERR

SEQ ID NO: 199167 - protein, 7 aa, synthetic construct
TGRTSST

SEQ ID NO: 199168 - protein, 7 aa, synthetic construct
TDRVKSS

SEQ ID NO: 199169 - protein, 7 aa, synthetic construct
MRTVDSR

SEQ ID NO: 199170 - protein, 7 aa, synthetic construct
TSRVDKL

SEQ ID NO: 199171 - protein, 7 aa, synthetic construct
SKRVDSS

SEQ ID NO: 199172 - protein, 7 aa, synthetic construct
TDRGMSR

SEQ ID NO: 199173 - protein, 7 aa, synthetic construct
SGRVTSA

SEQ ID NO: 199174 - protein, 7 aa, synthetic construct
DGRVRSV

SEQ ID NO: 199175 - protein, 7 aa, synthetic construct
TKREDTR

SEQ ID NO: 199176 - protein, 7 aa, synthetic construct
LGRSDVR

SEQ ID NO: 199177 - protein, 7 aa, synthetic construct
TAHVSSR

SEQ ID NO: 199178 - protein, 7 aa, synthetic construct
TGEVKNR

SEQ ID NO: 199179 - protein, 7 aa, synthetic construct
TGRSDKN

SEQ ID NO: 199180 - protein, 7 aa, synthetic construct
IDRVNSR

SEQ ID NO: 199181 - protein, 7 aa, synthetic construct
LGAVDKR

SEQ ID NO: 199182 - protein, 7 aa, synthetic construct
QGRVADR

SEQ ID NO: 199183 - protein, 7 aa, synthetic construct
HGRVDKA

SEQ ID NO: 199184 - protein, 7 aa, synthetic construct
FGRVTDR

SEQ ID NO: 199185 - protein, 7 aa, synthetic construct
TKRVDAV

SEQ ID NO: 199186 - protein, 7 aa, synthetic construct
TRSVDSK

SEQ ID NO: 199187 - protein, 7 aa, synthetic construct
RGRQDSP

SEQ ID NO: 199188 - protein, 7 aa, synthetic construct
IGRVDKH

SEQ ID NO: 199189 - protein, 7 aa, synthetic construct
LGRVASG

SEQ ID NO: 199190 - protein, 7 aa, synthetic construct
AGRGDPR

SEQ ID NO: 199191 - protein, 7 aa, synthetic construct
RTSVDSR

SEQ ID NO: 199192 - protein, 7 aa, synthetic construct
KGREDIR

SEQ ID NO: 199193 - protein, 7 aa, synthetic construct
KGRVDVL

SEQ ID NO: 199194 - protein, 7 aa, synthetic construct
TAEVRSR

SEQ ID NO: 199195 - protein, 7 aa, synthetic construct
AGRVDKG

SEQ ID NO: 199196 - protein, 7 aa, synthetic construct
TGDTRSR

SEQ ID NO: 199197 - protein, 7 aa, synthetic construct
TERGTSR

SEQ ID NO: 199198 - protein, 7 aa, synthetic construct
TGRNTER

SEQ ID NO: 199199 - protein, 7 aa, synthetic construct
TTRVRSD

SEQ ID NO: 199200 - protein, 7 aa, synthetic construct
TGRNIST

SEQ ID NO: 199201 - protein, 7 aa, synthetic construct
KNREDSR

SEQ ID NO: 199202 - protein, 7 aa, synthetic construct
VERVGSR

SEQ ID NO: 199203 - protein, 7 aa, synthetic construct
LDRVSSR

SEQ ID NO: 199204 - protein, 7 aa, synthetic construct
TGDVTKR

SEQ ID NO: 199205 - protein, 7 aa, synthetic construct
YGRVHSA

SEQ ID NO: 199206 - protein, 7 aa, synthetic construct
IGRVASQ

SEQ ID NO: 199207 - protein, 7 aa, synthetic construct
TRGVDQR

SEQ ID NO: 199208 - protein, 7 aa, synthetic construct
TDRVRSL

SEQ ID NO: 199209 - protein, 7 aa, synthetic construct
VGRADQR

SEQ ID NO: 199210 - protein, 7 aa, synthetic construct
MGRADNR

SEQ ID NO: 199211 - protein, 7 aa, synthetic construct
TGRNHSI

SEQ ID NO: 199212 - protein, 7 aa, synthetic construct
VGRIDSK

SEQ ID NO: 199213 - protein, 7 aa, synthetic construct
MGPVDKR

SEQ ID NO: 199214 - protein, 7 aa, synthetic construct
TKHTDSR

SEQ ID NO: 199215 - protein, 7 aa, synthetic construct
IGRVENR

SEQ ID NO: 199216 - protein, 7 aa, synthetic construct
TKRVDIA

SEQ ID NO: 199217 - protein, 7 aa, synthetic construct
TGRHQSI

SEQ ID NO: 199218 - protein, 7 aa, synthetic construct
KGRVDAN

SEQ ID NO: 199219 - protein, 7 aa, synthetic construct
IARSDSR

SEQ ID NO: 199220 - protein, 7 aa, synthetic construct
IKRVDSM

SEQ ID NO: 199221 - protein, 7 aa, synthetic construct
TGRKDVL

SEQ ID NO: 199222 - protein, 7 aa, synthetic construct
TGRPKSE

SEQ ID NO: 199223 - protein, 7 aa, synthetic construct
GTRVESR

SEQ ID NO: 199224 - protein, 7 aa, synthetic construct
MGRNDPR

SEQ ID NO: 199225 - protein, 7 aa, synthetic construct
VGRVDIR

SEQ ID NO: 199226 - protein, 7 aa, synthetic construct
TGKVESR

SEQ ID NO: 199227 - protein, 7 aa, synthetic construct
TKQVDSR

SEQ ID NO: 199228 - protein, 7 aa, synthetic construct
TGRNQSM

SEQ ID NO: 199229 - protein, 7 aa, synthetic construct
NDRVSSR

SEQ ID NO: 199230 - protein, 7 aa, synthetic construct
TGRADAR

SEQ ID NO: 199231 - protein, 7 aa, synthetic construct
VGREGSR

SEQ ID NO: 199232 - protein, 7 aa, synthetic construct
LGRVRSE

SEQ ID NO: 199233 - protein, 7 aa, synthetic construct
FKNVDSR

SEQ ID NO: 199234 - protein, 7 aa, synthetic construct
FGRVGSA

SEQ ID NO: 199235 - protein, 7 aa, synthetic construct
DGRVKSG

SEQ ID NO: 199236 - protein, 7 aa, synthetic construct
IGRVTSF

SEQ ID NO: 199237 - protein, 7 aa, synthetic construct
KGTGDSR

SEQ ID NO: 199238 - protein, 7 aa, synthetic construct
SKFVDSR

SEQ ID NO: 199239 - protein, 7 aa, synthetic construct
VGRNDSR

SEQ ID NO: 199240 - protein, 7 aa, synthetic construct
TKSHDSR

SEQ ID NO: 199241 - protein, 7 aa, synthetic construct
LNRVDSK

SEQ ID NO: 199242 - protein, 7 aa, synthetic construct
TGRSEPR

SEQ ID NO: 199243 - protein, 7 aa, synthetic construct
LGKVDAR

SEQ ID NO: 199244 - protein, 7 aa, synthetic construct
IGRVDKT

SEQ ID NO: 199245 - protein, 7 aa, synthetic construct
SVRQDSR

SEQ ID NO: 199246 - protein, 7 aa, synthetic construct
TGRSEGR

SEQ ID NO: 199247 - protein, 7 aa, synthetic construct
IGRVSSA

SEQ ID NO: 199248 - protein, 7 aa, synthetic construct
TPRVSSH

SEQ ID NO: 199249 - protein, 7 aa, synthetic construct
LGRVTER

SEQ ID NO: 199250 - protein, 7 aa, synthetic construct
AGRGDAR

SEQ ID NO: 199251 - protein, 7 aa, synthetic construct
YDRVASR

SEQ ID NO: 199252 - protein, 7 aa, synthetic construct
QVRTDSR

SEQ ID NO: 199253 - protein, 7 aa, synthetic construct
TGAIHSR

SEQ ID NO: 199254 - protein, 7 aa, synthetic construct
SGRVTSG

SEQ ID NO: 199255 - protein, 7 aa, synthetic construct
TKRVDIN

SEQ ID NO: 199256 - protein, 7 aa, synthetic construct
TEKKDSR

SEQ ID NO: 199257 - protein, 7 aa, synthetic construct
DGRVKER

SEQ ID NO: 199258 - protein, 7 aa, synthetic construct
RGRVDVV

SEQ ID NO: 199259 - protein, 7 aa, synthetic construct
MGRVVSQ

SEQ ID NO: 199260 - protein, 7 aa, synthetic construct
VGRADNR

SEQ ID NO: 199261 - protein, 7 aa, synthetic construct
TGRIDKN

SEQ ID NO: 199262 - protein, 7 aa, synthetic construct
TIRVDKN

SEQ ID NO: 199263 - protein, 7 aa, synthetic construct
VGAKDSR

SEQ ID NO: 199264 - protein, 7 aa, synthetic construct
LGRVLSH

SEQ ID NO: 199265 - protein, 7 aa, synthetic construct
TGRNDRV

SEQ ID NO: 199266 - protein, 7 aa, synthetic construct
MARNDSR

SEQ ID NO: 199267 - protein, 7 aa, synthetic construct
TERVQNR

SEQ ID NO: 199268 - protein, 7 aa, synthetic construct
TNRVQER

SEQ ID NO: 199269 - protein, 7 aa, synthetic construct
SGRVSSL

SEQ ID NO: 199270 - protein, 7 aa, synthetic construct
TGRAQSI

SEQ ID NO: 199271 - protein, 7 aa, synthetic construct
TGRVFKE

SEQ ID NO: 199272 - protein, 7 aa, synthetic construct
TDRVSSR

SEQ ID NO: 199273 - protein, 7 aa, synthetic construct
TGKQDQR

SEQ ID NO: 199274 - protein, 7 aa, synthetic construct
TGRQDGK

SEQ ID NO: 199275 - protein, 7 aa, synthetic construct
TGRATSN

SEQ ID NO: 199276 - protein, 7 aa, synthetic construct
TGGADRR

SEQ ID NO: 199277 - protein, 7 aa, synthetic construct
KGRQDSA

SEQ ID NO: 199278 - protein, 7 aa, synthetic construct
TVRVPDR

SEQ ID NO: 199279 - protein, 7 aa, synthetic construct
GGRADLR

SEQ ID NO: 199280 - protein, 7 aa, synthetic construct
TSRNDGR

SEQ ID NO: 199281 - protein, 7 aa, synthetic construct
LGRVMSG

SEQ ID NO: 199282 - protein, 7 aa, synthetic construct
IQRNDSR

SEQ ID NO: 199283 - protein, 7 aa, synthetic construct
LGRVDAK

SEQ ID NO: 199284 - protein, 7 aa, synthetic construct
TKSGDSR

SEQ ID NO: 199285 - protein, 7 aa, synthetic construct
IKGVDSR

SEQ ID NO: 199286 - protein, 7 aa, synthetic construct
TDRLPSR

SEQ ID NO: 199287 - protein, 7 aa, synthetic construct
TGRTDKF

SEQ ID NO: 199288 - protein, 7 aa, synthetic construct
KGRVDSS

SEQ ID NO: 199289 - protein, 7 aa, synthetic construct
TGDRQSR

SEQ ID NO: 199290 - protein, 7 aa, synthetic construct
IGRVDMR

SEQ ID NO: 199291 - protein, 7 aa, synthetic construct
IGRVTSQ

SEQ ID NO: 199292 - protein, 7 aa, synthetic construct
VPRVDSR

SEQ ID NO: 199293 - protein, 7 aa, synthetic construct
IGRKDSP

SEQ ID NO: 199294 - protein, 7 aa, synthetic construct
TGRKDMG

SEQ ID NO: 199295 - protein, 7 aa, synthetic construct
VGRVTSH

SEQ ID NO: 199296 - protein, 7 aa, synthetic construct
TMRVDKH

SEQ ID NO: 199297 - protein, 7 aa, synthetic construct
LARVDPR

SEQ ID NO: 199298 - protein, 7 aa, synthetic construct
VGRVPDR

SEQ ID NO: 199299 - protein, 7 aa, synthetic construct
TGRNADR

SEQ ID NO: 199300 - protein, 7 aa, synthetic construct
TGRAHSG

SEQ ID NO: 199301 - protein, 7 aa, synthetic construct
TGRMSSS

SEQ ID NO: 199302 - protein, 7 aa, synthetic construct
QGRVDGR

SEQ ID NO: 199303 - protein, 7 aa, synthetic construct
TGRKDVG

SEQ ID NO: 199304 - protein, 7 aa, synthetic construct
QDRVISR

SEQ ID NO: 199305 - protein, 7 aa, synthetic construct
TGRQQSV

SEQ ID NO: 199306 - protein, 7 aa, synthetic construct
TGKQDMR

SEQ ID NO: 199307 - protein, 7 aa, synthetic construct
MGRADLR

SEQ ID NO: 199308 - protein, 7 aa, synthetic construct
TERVMSK

SEQ ID NO: 199309 - protein, 7 aa, synthetic construct
TKRDDPR

SEQ ID NO: 199310 - protein, 7 aa, synthetic construct
TKRIDSG

SEQ ID NO: 199311 - protein, 7 aa, synthetic construct
TDRVPVR

SEQ ID NO: 199312 - protein, 7 aa, synthetic construct
TKMVDHR

SEQ ID NO: 199313 - protein, 7 aa, synthetic construct
MGRKDSM

SEQ ID NO: 199314 - protein, 7 aa, synthetic construct
TGKNDLR

SEQ ID NO: 199315 - protein, 7 aa, synthetic construct
TERVMAR

SEQ ID NO: 199316 - protein, 7 aa, synthetic construct
TGRKDTP

SEQ ID NO: 199317 - protein, 7 aa, synthetic construct
TKQSDSR

SEQ ID NO: 199318 - protein, 7 aa, synthetic construct
TTRVDKQ

SEQ ID NO: 199319 - protein, 7 aa, synthetic construct
TGKNDSR

SEQ ID NO: 199320 - protein, 7 aa, synthetic construct
TGKVYSS

SEQ ID NO: 199321 - protein, 7 aa, synthetic construct
TDRVPNR

SEQ ID NO: 199322 - protein, 7 aa, synthetic construct
TGRGVDR

SEQ ID NO: 199323 - protein, 7 aa, synthetic construct
MGRVSST

SEQ ID NO: 199324 - protein, 7 aa, synthetic construct
TKRQDSS

SEQ ID NO: 199325 - protein, 7 aa, synthetic construct
FGLKDSR

SEQ ID NO: 199326 - protein, 7 aa, synthetic construct
LQRVDTR

SEQ ID NO: 199327 - protein, 7 aa, synthetic construct
DGRVKST

SEQ ID NO: 199328 - protein, 7 aa, synthetic construct
KGRIDSV

SEQ ID NO: 199329 - protein, 7 aa, synthetic construct
TPRKDDR

SEQ ID NO: 199330 - protein, 7 aa, synthetic construct
QSRNDSR

SEQ ID NO: 199331 - protein, 7 aa, synthetic construct
TERVQSR

SEQ ID NO: 199332 - protein, 7 aa, synthetic construct
KGRVLSD

SEQ ID NO: 199333 - protein, 7 aa, synthetic construct
IGRVDKY

SEQ ID NO: 199334 - protein, 7 aa, synthetic construct
TVRNDGR

SEQ ID NO: 199335 - protein, 7 aa, synthetic construct
TGRVSAQ

SEQ ID NO: 199336 - protein, 7 aa, synthetic construct
LGRVTSY

SEQ ID NO: 199337 - protein, 7 aa, synthetic construct
TKYVDTR

SEQ ID NO: 199338 - protein, 7 aa, synthetic construct
LGRSESR

SEQ ID NO: 199339 - protein, 7 aa, synthetic construct
TGEKYSR

SEQ ID NO: 199340 - protein, 7 aa, synthetic construct
TGEVQKR

SEQ ID NO: 199341 - protein, 7 aa, synthetic construct
TSRTESR

SEQ ID NO: 199342 - protein, 7 aa, synthetic construct
TGRVTNN

SEQ ID NO: 199343 - protein, 7 aa, synthetic construct
TDRVAAR

SEQ ID NO: 199344 - protein, 7 aa, synthetic construct
VDRVASR

SEQ ID NO: 199345 - protein, 7 aa, synthetic construct
THKPDSR

SEQ ID NO: 199346 - protein, 7 aa, synthetic construct
TMRNESR

SEQ ID NO: 199347 - protein, 7 aa, synthetic construct
RGPVESR

SEQ ID NO: 199348 - protein, 7 aa, synthetic construct
THKVDLR

SEQ ID NO: 199349 - protein, 7 aa, synthetic construct
QGRVTSH

SEQ ID NO: 199350 - protein, 7 aa, synthetic construct
TGRPSSI

SEQ ID NO: 199351 - protein, 7 aa, synthetic construct
TGKFDSR

SEQ ID NO: 199352 - protein, 7 aa, synthetic construct
TMGVDKR

SEQ ID NO: 199353 - protein, 7 aa, synthetic construct
GGRVDKG

SEQ ID NO: 199354 - protein, 7 aa, synthetic construct
TGRQDIR

SEQ ID NO: 199355 - protein, 7 aa, synthetic construct
MGRIDTR

SEQ ID NO: 199356 - protein, 7 aa, synthetic construct
KGRVDNI

SEQ ID NO: 199357 - protein, 7 aa, synthetic construct
VGRVHSG

SEQ ID NO: 199358 - protein, 7 aa, synthetic construct
VSRVDTR

SEQ ID NO: 199359 - protein, 7 aa, synthetic construct
RGRVDIP

SEQ ID NO: 199360 - protein, 7 aa, synthetic construct
TSRVADR

SEQ ID NO: 199361 - protein, 7 aa, synthetic construct
TKRVDVQ

SEQ ID NO: 199362 - protein, 7 aa, synthetic construct
TKRVDNF

SEQ ID NO: 199363 - protein, 7 aa, synthetic construct
TQRKDSA

SEQ ID NO: 199364 - protein, 7 aa, synthetic construct
TVKHDSR

SEQ ID NO: 199365 - protein, 7 aa, synthetic construct
TGRQSSL

SEQ ID NO: 199366 - protein, 7 aa, synthetic construct
TGRVHAQ

SEQ ID NO: 199367 - protein, 7 aa, synthetic construct
QGREDKR

SEQ ID NO: 199368 - protein, 7 aa, synthetic construct
TMRVDKS

SEQ ID NO: 199369 - protein, 7 aa, synthetic construct
AGRETSR

SEQ ID NO: 199370 - protein, 7 aa, synthetic construct
TSRVSSL

SEQ ID NO: 199371 - protein, 7 aa, synthetic construct
IGKSDSR

SEQ ID NO: 199372 - protein, 7 aa, synthetic construct
VGRVDLR

SEQ ID NO: 199373 - protein, 7 aa, synthetic construct
MGRVSSS

SEQ ID NO: 199374 - protein, 7 aa, synthetic construct
AKHVDSR

SEQ ID NO: 199375 - protein, 7 aa, synthetic construct
TKRVNSE

SEQ ID NO: 199376 - protein, 7 aa, synthetic construct
TGRADKY

SEQ ID NO: 199377 - protein, 7 aa, synthetic construct
IGRVADR

SEQ ID NO: 199378 - protein, 7 aa, synthetic construct
TSRADLR

SEQ ID NO: 199379 - protein, 7 aa, synthetic construct
KGGTDSR

SEQ ID NO: 199380 - protein, 7 aa, synthetic construct
KGRVDNG

SEQ ID NO: 199381 - protein, 7 aa, synthetic construct
TEKVPSR

SEQ ID NO: 199382 - protein, 7 aa, synthetic construct
YGKMDSR

SEQ ID NO: 199383 - protein, 7 aa, synthetic construct
TGRVADK

SEQ ID NO: 199384 - protein, 7 aa, synthetic construct
TGVNDRR

SEQ ID NO: 199385 - protein, 7 aa, synthetic construct
TLRTESR

SEQ ID NO: 199386 - protein, 7 aa, synthetic construct
VGRVGSG

SEQ ID NO: 199387 - protein, 7 aa, synthetic construct
VGRTDPR

SEQ ID NO: 199388 - protein, 7 aa, synthetic construct
TDRVQMR

SEQ ID NO: 199389 - protein, 7 aa, synthetic construct
TGRVHSS

SEQ ID NO: 199390 - protein, 7 aa, synthetic construct
KGRSDSI

SEQ ID NO: 199391 - protein, 7 aa, synthetic construct
TGDVMKR

SEQ ID NO: 199392 - protein, 7 aa, synthetic construct
TGSGSSR

SEQ ID NO: 199393 - protein, 7 aa, synthetic construct
MARVDTR

SEQ ID NO: 199394 - protein, 7 aa, synthetic construct
RGAADSR

SEQ ID NO: 199395 - protein, 7 aa, synthetic construct
TKRLDSA

SEQ ID NO: 199396 - protein, 7 aa, synthetic construct
TERVRSI

SEQ ID NO: 199397 - protein, 7 aa, synthetic construct
TGKNDQR

SEQ ID NO: 199398 - protein, 7 aa, synthetic construct
TFRKDSA

SEQ ID NO: 199399 - protein, 7 aa, synthetic construct
SGRVDKA

SEQ ID NO: 199400 - protein, 7 aa, synthetic construct
TGRVDSK

SEQ ID NO: 199401 - protein, 7 aa, synthetic construct
TGRDTAR

SEQ ID NO: 199402 - protein, 7 aa, synthetic construct
KGRVDDK

SEQ ID NO: 199403 - protein, 7 aa, synthetic construct
TGRTDRS

SEQ ID NO: 199404 - protein, 7 aa, synthetic construct
TGDVSKR

SEQ ID NO: 199405 - protein, 7 aa, synthetic construct
TERAMSR

SEQ ID NO: 199406 - protein, 7 aa, synthetic construct
RGSVDTR

SEQ ID NO: 199407 - protein, 7 aa, synthetic construct
KDRVDPR

SEQ ID NO: 199408 - protein, 7 aa, synthetic construct
SGRVSSN

SEQ ID NO: 199409 - protein, 7 aa, synthetic construct
TGRIHSV

SEQ ID NO: 199410 - protein, 7 aa, synthetic construct
TGDKPSR

SEQ ID NO: 199411 - protein, 7 aa, synthetic construct
TQRVAER

SEQ ID NO: 199412 - protein, 7 aa, synthetic construct
LGRVDKT

SEQ ID NO: 199413 - protein, 7 aa, synthetic construct
TQRVELR

SEQ ID NO: 199414 - protein, 7 aa, synthetic construct
FGKVDNR

SEQ ID NO: 199415 - protein, 7 aa, synthetic construct
SGRVEIR

SEQ ID NO: 199416 - protein, 7 aa, synthetic construct
NDRVPSR

SEQ ID NO: 199417 - protein, 7 aa, synthetic construct
VGRVNSM

SEQ ID NO: 199418 - protein, 7 aa, synthetic construct
TKRVDYA

SEQ ID NO: 199419 - protein, 7 aa, synthetic construct
TTRGDSR

SEQ ID NO: 199420 - protein, 7 aa, synthetic construct
THRVDKA

SEQ ID NO: 199421 - protein, 7 aa, synthetic construct
TIRSESR

SEQ ID NO: 199422 - protein, 7 aa, synthetic construct
VNRVDGR

SEQ ID NO: 199423 - protein, 7 aa, synthetic construct
RGKVDSM

SEQ ID NO: 199424 - protein, 7 aa, synthetic construct
TERVKSI

SEQ ID NO: 199425 - protein, 7 aa, synthetic construct
VARPDSR

SEQ ID NO: 199426 - protein, 7 aa, synthetic construct
KGRTDSA

SEQ ID NO: 199427 - protein, 7 aa, synthetic construct
RGTVDAR

SEQ ID NO: 199428 - protein, 736 aa, synthetic construct
MAADGYLPDWLEDNLSEGIREWWDLKPGAPKPKANQQKQDDGRGLVLPGYKYLGPFNGLDKGEPVNAADAAALEHDKAYDQQLKAGDNPYLRYNHADAEFQERLQEDTSFGGNLGRAVFQAKKRVLEPLGLVEEGAKTAPGKKRPVEQSPQEPDSSSGIGKTGQQPAKKRLNFGQTGDSESVPDPQPLGEPPATPAAVGPTTMASGGGAPMADNNEGADGVGNASGNWHCDSTWLGDRVITTSTRTWALPTYNNHLYKQISSASTGASNDNHYFGYSTPWGYFDFNRFHCHFSPRDWQRLINNNWGFRPKRLNFKLFNIQVKEVTTNDGVTTIANNLTSTVQVFSDSEYQLPYVLGSAHQGCLPPFPADVFMIPQYGYLTLNNGSQAVGRSSFYCLEYFPSQMLRTGNNFTFSYTFEEVPFHSSYAHSQSLDRLMNPLIDQYLYYLNRTQNQSGSAQNKDLLFSRGSPAGMSVQPKNWLPGPCYRQQRVSKTKTDNNNSNFTWTGASKYNLNGRESIINPGTAMASHKDDEDKFFPMSGVMIFGKESAGASNTALDNVMITDEEEIKATNPVATERFGTVAVNFQSSSTDPATGDVHAMGALPGMVWQDRDVYLQGPIWAKIPHTDGHFHPSPLMGGFGLKNPPPQILIKNTPVPANPPAEFSATKFASFITQYSTGQVSVEIEWELQKENSKRWNPEVQYTSNYAKSANVDFTVDNNGLYTEPRPIGTRYLTRPL

SEQ ID NO: 199429 - DNA, 2211 bp, synthetic construct
  source 1..2211: mol_type = other DNA
atggctgccgatggttatcttccagattggctcgaggacaacctctctgagggcattcgcgagtggtgggacttgaaacctggagccccgaagcccaaagccaaccagcaaaagcaggacgacggccggggtctggtgcttcctggctacaagtacctcggacccttcaacggactcgacaagggggagcccgtcaacgcggcggacgcagcggccctcgagcacgacaaggcctacgaccagcagctcaaagcgggtgacaatccgtacctgcggtataaccacgccgacgccgagtttcaggagcgtctgcaagaagatacgtcttttgggggcaacctcgggcgagcagtcttccaggccaagaagcgggttctcgaacctctcggtctggttgaggaaggcgctaagacggctcctggaaagaaacgtccggtagagcagtcgccacaagagccagactcctcctcgggcatcggcaagacaggccagcagcccgctaaaaagagactcaattttggtcagactggcgactcagagtcagtccccgatccacaacctctcggagaacctccagcaacccccgctgctgtgggacctactacaatggcttcaggcggtggcgcaccaatggcagacaataacgaaggcgccgacggagtgggtaatgcctcaggaaattggcattgcgattccacatggctgggcgacagagtcatcaccaccagcacccgcacctgggccttgcccacctacaataaccacctctacaagcaaatctccagtgcttcaacgggggccagcaacgacaaccactacttcggctacagcaccccctgggggtattttgatttcaacagattccactgccacttttcaccacgtgactggcagcgactcatcaacaacaattggggattccggcccaagagactcaacttcaaactcttcaacatccaagtcaaggaggtcacgacgaatgatggcgtcacaaccatcgctaataaccttaccagcacggttcaagtcttctcggactcggagtaccagcttccgtacgtcctcggctctgcgcaccagggctgcctccctccgttcccggcggacgtgttcatgattccgcaatacggctacctgacgctcaacaatggcagccaagccgtgggacgttcatccttttactgcctggaatatttcccttctcagatgctgagaacgggcaacaactttaccttcagctacacctttgaggaagtgcctttccacagcagctacgcgcacagccagagcctggaccggctgatgaatcctctcatcgaccaatacctgtattacctgaacagaactcaaaatcagtccggaagtgcccaaaacaaggacttgctgtttagccgtgggtctccagctggcatgtctgttcagcccaaaaactggctacctggaccctgttatcggcagcagcgcgtttctaaaacaaaaacagacaacaacaacagcaattttacctggactggtgcttcaaaatataacctcaatgggcgtgaatccatcatcaaccctggcactgctatggcctcacacaaagacgacgaagacaagttctttcccatgagcggtgtcatgatttttggaaaagagagcgccggagcttcaaacactgcattggacaatgtcatgattacagacgaagaggaaattaaagccactaaccctgtggccaccgaaagatttgggaccgtggcagtcaatttccagagcagcagcacagaccctgcgaccggagatgtgcatgctatgggagcattacctggcatggtgtggcaagatagagacgtgtacctgcagggtcccatttgggccaaaattcctcacacagatggacactttcacccgtctcctcttatgggcggctttggactcaagaacccgcctcctcagatcctcatcaaaaacacgcctgttcctgcgaatcctccggcggagttttcagctacaaagtttgcttcattcatcacccaatactccacaggacaagtgagtgtggaaattgaatgggagctgcagaaagaaaacagcaagcgctggaatcccgaagtgcagtacacatccaattatgcaaaatctgccaacgttgattttactgtggacaacaatggactttatactgagcctcgccccattggcacccgttaccttacccgtcccctgtaa

SEQ ID NO: 199430 - protein, 735 aa, synthetic construct [sequence omitted]

SEQ ID NO: 199431 - DNA, 2208 bp, synthetic construct
  source 1..2208: mol_type = other DNA
atggctgccgatggttatcttccagattggctcgaggacactctctctgaaggaataagacagtggtggaagctcaaacctggcccaccaccaccaaagcccgcagagcggcataaggacgacagcaggggtcttgtgcttcctgggtacaagtacctcggacccttcaacggactcgacaagggagagccggtcaacgaggcagacgccgcggccctcgagcacgacaaagcctacgaccggcagctcgacagcggagacaacccgtacctcaagtacaaccacgccgacgcggagtttcaggagcgccttaaagaagatacgtcttttgggggcaacctcggacgagcagtcttccaggcgaaaaagagggttcttgaacctctgggcctggttgaggaacctgttaagacggctccgggaaaaaagaggccggtagagcactctcctgtggagccagactcctcctcgggaaccggaaaggcgggccagcagcctgcaagaaaaagattgaattttggtcagactggagacgcagactcagtacctgacccccagcctctcggacagccaccagcagccccctctggtctgggaactaatacgatggctacaggcagtggcgcaccaatggcagacaataacgagggcgccgacggagtgggtaattcctcgggaaattggcattgcgattccacatggatgggcgacagagtcatcaccaccagcacccgaacctgggccctgcccacctacaacaaccacctctacaaacaaatttccagccaatcaggagcctcgaacgacaatcactactttggctacagcaccccttgggggtattttgacttcaacagattccactgccacttttcaccacgtgactggcaaagactcatcaacaacaactggggattccgacccaagagactcaacttcaagctctttaacattcaagtcaaagaggtcacgcagaatgacggtacgacgacgattgccaataaccttaccagcacggttcaggtgtttactgactcggagtaccagctcccgtacgtcctcggctcggcgcatcaaggatgcctcccgccgttcccagcagacgtcttcatggtgccacagtatggatacctcaccctgaacaacgggagtcaggcagtaggacgctcttcattttactgcctggagtactttccttctcagatgctgcgtaccggaaacaactttaccttcagctacacttttgaggacgttcctttccacagcagctacgctcacagccagagtctggaccgtctcatgaatcctctcatcgaccagtacctgtattacttgagcagaacaaacactccaagtggaaccaccacgcagtcaaggcttcagttttctcaggccggagcgagtgacattcgggaccagtctaggaactggcttcctggaccctgttaccgccagcagcgagtatcaaagacatctgcggataacaacaacagtgaatactcgtggactggagctaccaagtaccacctcaatggcagagactctctggtgaatccgggcccggccatggcaagccacaaggacgatgaagaaaagttttttcctcagagcggggttctcatctttgggaagcaaggctcagagaaaacaaatgtggacattgaaaaggtcatgattacagacgaagaggaaatcaggacaaccaatcccgtggctacggagcagtatggttctgtatctaccaacctccagagaggcaacagacaagcagctaccgcagatgtcaacacacaaggcgttcttccaggcatggtctggcaggacagagatgtgtaccttcaggggcccatctgggcaaagattccacacacggacggacattttcacccctctcccctcatgggtggattcggacttaaacaccctcctccacagattctcatcaagaacaccccggtacctgcgaatccttcgaccaccttcagtgcggcaaagtttgcttccttcatcacacagtactccacgggacaggtcagcgtggagatcgagtgggagctgcagaaggaaaacagcaaacgctggaatcccgaaattcagtacacttccaactacaacaagtctgttaatgtggactttactgtggacactaatggcgtgtattcagagcctcgccccattggcaccagatacctgactcgtaatctgtaa

SEQ ID NO: 199432 - protein, 736 aa, synthetic construct
MAADGYLPDWLEDNLSEGIREWWALKPGVPQPKANQQHQDNRRGLVLPGYKYLGPGNGLDKGEPVNEADAAALEHDKAYDQQLKAGDNPYLKYNHADAEFQERLQEDTSFGGNLGRAVFQAKKRILEPLGLVEEAAKTAPGKKGAVDQSPQEPDSSSGVGKSGKQPARKRLNFGQTGDSESVPDPQPLGEPPAAPTSLGSNTMASGGGAPMADNNEGADGVGNSSGNWHCDSQWLGDRVITTSTRTWALPTYNNHLYKQISSQSGASNDNHYFGYSTPWGYFDFNRFHCHFSPRDWQRLINNNWGFRPKKLSFKLFNIQVRGVTQNDGTTTIANNLTSTVQVFTDSEYQLPYVLGSAHQGCLPPFPADVFMVPQYGYLTLNNGSQAVGRSSFYCLEYFPSQMLRTGNNFQFSYTFEDVPFHSSYAHSQSLDRLMNPLIDQYLYYLNRTQGTTSGTTNQSRLLFSQAGPQSMSLQARNWLPGPCYRQQRLSKTANDNNNSNFPWTAASKYHLNGRDSLVNPGPAMASHKDDEEKFFPMHGNLIFGKEGTTASNAELDNVMITDEEEIRTTNPVATEQYGTVANNLQSSNTAPTTGTVNHQGALPGMVWQDRDVYLQGPIWAKIPHTDGHFHPSPLMGGFGLKHPPPQIMIKNTPVPANPPTTFSPAKFASFITQYSTGQVSVEIEWELQKENSKRWNPEIQYTSNYNKSVNVDFTVDTNGVYSEPRPIGTRYLTRNL

SEQ ID NO: 199433 - DNA, 2211 bp, synthetic construct
  source 1..2211: mol_type = other DNA
atggctgctgacggttatcttccagattggctcgaggacaacctttctgaaggcattcgtgagtggtgggctctgaaacctggagtccctcaacccaaagcgaaccaacaacaccaggacaaccgtcggggtcttgtgcttccgggttacaaatacctcggacccggtaacggactcgacaaaggagagccggtcaacgaggcggacgcggcagccctcgaacacgacaaagcttacgaccagcagctcaaggccggtgacaacccgtacctcaagtacaaccacgccgacgccgagtttcaggagcgtcttcaagaagatacgtcttttgggggcaaccttggcagagcagtcttccaggccaaaaagaggatccttgagcctcttggtctggttgaggaagcagctaaaacggctcctggaaagaagggggctgtagatcagtctcctcaggaaccggactcatcatctggtgttggcaaatcgggcaaacagcctgccagaaaaagactaaatttcggtcagactggagactcagagtcagtcccagaccctcaacctctcggagaaccaccagcagcccccacaagtttgggatctaatacaatggcttcaggcggtggcgcaccaatggcagacaataacgagggtgccgatggagtgggtaattcctcaggaaattggcattgcgattcccaatggctgggcgacagagtcatcaccaccagcaccagaacctgggccctgcccacttacaacaaccatctctacaagcaaatctccagccaatcaggagcttcaaacgacaaccactactttggctacagcaccccttgggggtattttgactttaacagattccactgccacttctcaccacgtgactggcagcgactcattaacaacaactggggattccggcccaagaaactcagcttcaagctcttcaacatccaagttagaggggtcacgcagaacgatggcacgacgactattgccaataaccttaccagcacggttcaagtgtttacggactcggagtatcagctcccgtacgtgctcgggtcggcgcaccaaggctgtctcccgccgtttccagcggacgtcttcatggtccctcagtatggatacctcaccctgaacaacggaagtcaagcggtgggacgctcatccttttactgcctggagtacttcccttcgcagatgctaaggactggaaataacttccaattcagctataccttcgaggatgtaccttttcacagcagctacgctcacagccagagtttggatcgcttgatgaatcctcttattgatcagtatctgtactacctgaacagaacgcaaggaacaacctctggaacaaccaaccaatcacggctgctttttagccaggctgggcctcagtctatgtctttgcaggccagaaattggctacctgggccctgctaccggcaacagagactttcaaagactgctaacgacaacaacaacagtaactttccttggacagcggccagcaaatatcatctcaatggccgcgactcgctggtgaatccaggaccagctatggccagtcacaaggacgatgaagaaaaatttttccctatgcacggcaatctaatatttggcaaagaagggacaacggcaagtaacgcagaattagataatgtaatgattacggatgaagaagagattcgtaccaccaatcctgtggcaacagagcagtatggaactgtggcaaataacttgcagagctcaaatacagctcccacgactggaactgtcaatcatcagggggccttacctggcatggtgtggcaagatcgtgacgtgtaccttcaaggacctatctgggcaaagattcctcacacggatggacactttcatccttctcctctgatgggaggctttggactgaaacatccgcctcctcaaatcatgatcaaaaatactccggtaccggcaaatcctccgacgactttcagcccggccaagtttgcttcatttatcactcagtactccactggacaggtcagcgtggaaattgagtgggagctacagaaagaaaacagcaaacgttggaatccagagattcagtacacttccaactacaacaagtctgttaatgtggactttactgtagacactaatggtgtttatagtgaacctcgccctattggaacccggtatctcacacgaaacttgtga

SEQ ID NO: 199434 - protein, 736 aa, synthetic construct
MAADGYLPDWLEDNLSEGIREWWALKPGVPQPKANQQHQDNRRGLVLPGYKYLGPGNGLDKGEPVNEADAAALEHDKAYDQQLKAGDNPYLKYNHADAEFQERLQEDTSFGGNLGRAVFQAKKRILEPLGLVEEAAKTAPGKKRPVDQSPQEPDSSSGVGKSGKQPARKRLNFGQTGDSESVPDPQPLGEPPAAPTSLGSNTMASGGGAPMADNNEGADGVGNSSGNWHCDSQWLGDRVITTSTRTWALPTYNNHLYKQISSQSGASNDNHYFGYSTPWGYFDFNRFHCHFSPRDWQRLINNNWGFRPKKLSFKLFNIQVKEVTQNDGTTTIANNLTSTVQVFTDSEYQLPYVLGSAHQGCLPPFPADVFMVPQYGYLTLNNGSQAVGRSSFYCLEYFPSQMLRTGNNFQFSYTFEDVPFHSSYAHSQSLDRLMNPLIDQYLYYLNRTQGTTSGTTNQSRLLFSQAGPQSMSLQARNWLPGPCYRQQRLSKTANDNNNSNFPWTAASKYHLNGRDSLVNPGPAMASHKDDEEKFFPMHGNLIFGKEGTTASNAELDNVMITDEEEIRTTNPVATEQYGTVANNLQSSNTAPTTRTVNDQGALPGMVWQDRDVYLQGPIWAKIPHTDGHFHPSPLMGGFGLKHPPPQIMIKNTPVPANPPTTFSPAKFASFITQYSTGQVSVEIEWELQKENSKRWNPEIQYTSNYNKSVNVDFTVDTNGVYSEPRPIGTRYLTRNL

SEQ ID NO: 199435 - DNA, 2211 bp, synthetic construct
  source 1..2211: mol_type = other DNA
atggctgctgacggttatcttccagattggctcgaggacaacctttctgaaggcattcgtgagtggtgggctctgaaacctggagtccctcaacccaaagcgaaccaacaacaccaggacaaccgtcggggtcttgtgcttccgggttacaaatacctcggacccggtaacggactcgacaaaggagagccggtcaacgaggcggacgcggcagccctcgaacacgacaaagcttacgaccagcagctcaaggccggtgacaacccgtacctcaagtacaaccacgccgacgccgagtttcaggagcgtcttcaagaagatacgtcttttgggggcaaccttggcagagcagtcttccaggccaaaaagaggatccttgagcctcttggtctggttgaggaagcagctaaaacggctcctggaaagaagaggcctgtagatcagtctcctcaggaaccggactcatcatctggtgttggcaaatcgggcaaacagcctgccagaaaaagactaaatttcggtcagactggcgactcagagtcagtcccagaccctcaacctctcggagaaccaccagcagcccccacaagtttgggatctaatacaatggcttcaggcggtggcgcaccaatggcagacaataacgagggtgccgatggagtgggtaattcctcaggaaattggcattgcgattcccaatggctgggcgacagagtcatcaccaccagcaccagaacctgggccctgcccacttacaacaaccatctctacaagcaaatctccagccaatcaggagcttcaaacgacaaccactactttggctacagcaccccttgggggtattttgactttaacagattccactgccacttctcaccacgtgactggcagcgactcattaacaacaactggggattccggcccaagaaactcagcttcaagctcttcaacatccaagttaaagaggtcacgcagaacgatggcacgacgactattgccaataaccttaccagcacggttcaagtgtttacggactcggagtatcagctcccgtacgtgctcgggtcggcgcaccaaggctgtctcccgccgtttccagcggacgtcttcatggtccctcagtatggatacctcaccctgaacaacggaagtcaagcggtgggacgctcatccttttactgcctggagtacttcccttcgcagatgctaaggactggaaataacttccaattcagctataccttcgaggatgtaccttttcacagcagctacgctcacagccagagtttggatcgcttgatgaatcctcttattgatcagtatctgtactacctgaacagaacgcaaggaacaacctctggaacaaccaaccaatcacggctgctttttagccaggctgggcctcagtctatgtctttgcaggccagaaattggctacctgggccctgctaccggcaacagagactttcaaagactgctaacgacaacaacaacagtaactttccttggacagcggccagcaaatatcatctcaatggccgcgactcgctggtgaatccaggaccagctatggccagtcacaaggacgatgaagaaaaatttttccctatgcacggcaatctaatatttggcaaagaagggacaacggcaagtaacgcagaattagataatgtaatgattacggatgaagaagagattcgtaccaccaatcctgtggcaacagagcagtatggaactgtggcaaataacttgcagagctcaaatacagctcccacgactagaactgtcaatgatcagggggccttacctggcatggtgtggcaagatcgtgacgtgtaccttcaaggacctatctgggcaaagattcctcacacggatggacactttcatccttctcctctgatgggaggctttggactgaaacatccgcctcctcaaatcatgatcaaaaatactccggtaccggcaaatcctccgacgactttcagcccggccaagtttgcttcatttatcactcagtactccactggacaggtcagcgtggaaattgagtgggagctacagaaagaaaacagcaaacgttggaatccagagattcagtacacttccaactacaacaagtctgttaatgtggactttactgtagacactaatggtgtttatagtgaacctcgccctattggaacccggtatctcacacgaaacttgtaa

SEQ ID NO: 199436 - protein, 734 aa, synthetic construct
MTDGYLPDWLEDNLSEGVREWWALQPGAPKPKANQQHQDNARGLVLPGYKYLGPGNGLDKGEPVNAADAAALEHDKAYDQQLKAGDNPYLKYNHADAEFQQRLQGDTSFGGNLGRAVFQAKKRVLEPLGLVEQAGETAPGKKRPLIESPQQPDSSTGIGKKGKQPAKKKLVFEDETGAGDGPPEGSTSGAMSDDSEMRAAAGGAAVEGGQGADGVGNASGDWHCDSTWSEGHVTTTSTRTWVLPTYNNHLYKRLGESLQSNTYNGFSTPWGYFDFNRFHCHFSPRDWQRLINNNWGMRPKAMRVKIFNIQVKEVTTSNGETTVANNLTSTVQIFADSSYELPYVMDAGQEGSLPPFPNDVFMVPQYGYCGLVTGNTSQQQTDRNAFYCLEYFPSQMLRTGNNFEITYSFEKVPFHSMYAHSQSLDRLMNPLIDQYLWGLQSTTTGTTLNAGTATTNFTKLRPTNFSNFKKNWLPGPSIKQQGFSKTANQNYKIPATGSDSLIKYETHSTLDGRWSALTPGPPMATAGPADSKFSNSQLIFAGPKQNGNTATVPGTLIFTSEEELAATNATDTDMWGNLPGGDQSNSNLPTVDRLTALGAVPGMVWQNRDIYYQGPIWAKIPHTDGHFHPSPLIGGFGLKHPPPQIFIKNTPVPANPATTFSSTPVNSFITQYSTGQVSVQIDWEIQKERSKRWNPEVQFTSNYGQQNSLLWAPDAAGKYTEPRAIGTRYLTHHL

SEQ ID NO: 199437 - DNA, 2202 bp, synthetic construct
  source 1..2202: mol_type = other DNA
atgactgacggttaccttccagattggctagaggacaacctctctgaaggcgttcgagagtggtgggcgctgcaacctggagcccctaaacccaaggcaaatcaacaacatcaggacaacgctcggggtcttgtgcttccgggttacaaatacctcggacccggcaacggactcgacaagggggaacccgtcaacgcagcggacgcggcagccctcgagcacgacaaggcctacgaccagcagctcaaggccggtgacaacccctacctcaagtacaaccacgccgacgcggagttccagcagcggcttcagggcgacacatcgtttgggggcaacctcggcagagcagtcttccaggccaaaaagagggttcttgaacctcttggtctggttgagcaagcgggtgagacggctcctggaaagaagagaccgttgattgaatccccccagcagcccgactcctccacgggtatcggcaaaaaaggcaagcagccggctaaaaagaagctcgttttcgaagacgaaactggagcaggcgacggaccccctgagggatcaacttccggagccatgtctgatgacagtgagatgcgtgcagcagctggcggagctgcagtcgagggcggacaaggtgccgatggagtgggtaatgcctcgggtgattggcattgcgattccacctggtctgagggccacgtcacgaccaccagcaccagaacctgggtcttgcccacctacaacaaccacctctacaagcgactcggagagagcctgcagtccaacacctacaacggattctccaccccctggggatactttgacttcaaccgcttccactgccacttctcaccacgtgactggcagcgactcatcaacaacaactggggcatgcgacccaaagccatgcgggtcaaaatcttcaacatccaggtcaaggaggtcacgacgtcgaacggcgagacaacggtggctaataaccttaccagcacggttcagatctttgcggactcgtcgtacgaactgccgtacgtgatggatgcgggtcaagagggcagcctgcctccttttcccaacgacgtctttatggtgccccagtacggctactgtggactggtgaccggcaacacttcgcagcaacagactgacagaaatgccttctactgcctggagtactttccttcgcagatgctgcggactggcaacaactttgaaattacgtacagttttgagaaggtgcctttccactcgatgtacgcgcacagccagagcctggaccggctgatgaaccctctcatcgaccagtacctgtggggactgcaatcgaccaccaccggaaccaccctgaatgccgggactgccaccaccaactttaccaagctgcggcctaccaacttttccaactttaaaaagaactggctgcccgggccttcaatcaagcagcagggcttctcaaagactgccaatcaaaactacaagatccctgccaccgggtcagacagtctcatcaaatacgagacgcacagcactctggacggaagatggagtgccctgacccccggacctccaatggccacggctggacctgcggacagcaagttcagcaacagccagctcatctttgcggggcctaaacagaacggcaacacggccaccgtacccgggactctgatcttcacctctgaggaggagctggcagccaccaacgccaccgatacggacatgtggggcaacctacctggcggtgaccagagcaacagcaacctgccgaccgtggacagactgacagccttgggagccgtgcctggaatggtctggcaaaacagagacatttactaccagggtcccatttgggccaagattcctcataccgatggacactttcacccctcaccgctgattggtgggtttgggctgaaacacccgcctcctcaaatttttatcaagaacaccccggtacctgcgaatcctgcaacgaccttcagctctactccggtaaactccttcattactcagtacagcactggccaggtgtcggtgcagattgactgggagatccagaaggagcggtccaaacgctggaaccccgaggtccagtttacctccaactacggacagcaaaactctctgttgtgggctcccgatgcggctgggaaatacactgagcctagggctatcggtacccgctacctcacccaccacctg

SEQ ID NO: 199438 - protein, 724 aa, synthetic construct
MSFVDHPPDWLEEVGEGLREFLGLEAGPPKPKPNQQHQDQARGLVLPGYNYLGPGNGLDRGEPVNRADEVAREHDISYNEQLEAGDNPYLKYNHADAEFQEKLADDTSFGGNLGKAVFQAKKRVLEPFGLVEEGAKTAPTGKRIDDHFPKRKKARTEEDSKPSTSSDAEAGPSGSQQLQIPAQPASSLGADTMSAGGGGPLGDNNQGADGVGNASGDWHCDSTWMGDRVVTKSTRTWVLPSYNNHQYREIKSGSVDGSNANAYFGYSTPWGYFDFNRFHSHWSPRDWQRLINNYWGFRPRSLRVKIFNIQVKEVTVQDSTTTIANNLTSTVQVFTDDDYQLPYVVGNGTEGCLPAFPPQVFTLPQYGYATLNRDNTENPTERSSFFCLEYFPSKMLRTGNNFEFTYNFEEVPFHSSFAPSQNLFKLANPLVDQYLYRFVSTNNTGGVQFNKNLAGRYANTYKNWFPGPMGRTQGWNLGSGVNRASVSAFATTNRMELEGASYQVPPQPNGMTNNLQGSNTYALENTMIFNSQPANPGTTATYLEGNMLITSESETQPVNRVAYNVGGQMATNNQSSTTAPATGTYNLQEIVPGSVWMERDVYLQGPIWAKIPETGAHFHPSPAMGGFGLKHPPPMMLIKNTPVPGNITSFSDVPVSSFITQYSTGQVTVEMEWELKKENSKRWNPEIQYTNNYNDPQFVDFAPDSTGEYRTTRPIGTRYLTRPL

SEQ ID NO: 199439 - DNA, 2175 bp, synthetic construct
  source 1..2175: mol_type = other DNA
atgtcttttgttgatcaccctccagattggttggaagaagttggtgaaggtcttcgcgagtttttgggccttgaagcgggcccaccgaaaccaaaacccaatcagcagcatcaagatcaagcccgtggtcttgtgctgcctggttataactatctcggacccggaaacggtctcgatcgaggagagcctgtcaacagggcagacgaggtcgcgcgagagcacgacatctcgtacaacgagcagcttgaggcgggagacaacccctacctcaagtacaaccacgcggacgccgagtttcaggagaagctcgccgacgacacatccttcgggggaaacctcggaaaggcagtctttcaggccaagaaaagggttctcgaaccttttggcctggttgaagagggtgctaagacggcccctaccggaaagcggatagacgaccactttccaaaaagaaagaaggctcggaccgaagaggactccaagccttccacctcgtcagacgccgaagctggacccagcggatcccagcagctgcaaatcccagcccaaccagcctcaagtttgggagctgatacaatgtctgcgggaggtggcggcccattgggcgacaataaccaaggtgccgatggagtgggcaatgcctcgggagattggcattgcgattccacgtggatgggggacagagtcgtcaccaagtccacccgaacctgggtgctgcccagctacaacaaccaccagtaccgagagatcaaaagcggctccgtcgacggaagcaacgccaacgcctactttggatacagcaccccctgggggtactttgactttaaccgcttccacagccactggagcccccgagactggcaaagactcatcaacaactactggggcttcagaccccggtccctcagagtcaaaatcttcaacattcaagtcaaagaggtcacggtgcaggactccaccaccaccatcgccaacaacctcacctccaccgtccaagtgtttacggacgacgactaccagctgccctacgtcgtcggcaacgggaccgagggatgcctgccggccttccctccgcaggtctttacgctgccgcagtacggttacgcgacgctgaaccgcgacaacacagaaaatcccaccgagaggagcagcttcttctgcctagagtactttcccagcaagatgctgagaacgggcaacaactttgagtttacctacaactttgaggaggtgcccttccactccagcttcgctcccagtcagaacctgttcaagctggccaacccgctggtggaccagtacttgtaccgcttcgtgagcacaaataacactggcggagtccagttcaacaagaacctggccgggagatacgccaacacctacaaaaactggttcccggggcccatgggccgaacccagggctggaacctgggctccggggtcaaccgcgccagtgtcagcgccttcgccacgaccaataggatggagctcgagggcgcgagttaccaggtgcccccgcagccgaacggcatgaccaacaacctccagggcagcaacacctatgccctggagaacactatgatcttcaacagccagccggcgaacccgggcaccaccgccacgtacctcgagggcaacatgctcatcaccagcgagagcgagacgcagccggtgaaccgcgtggcgtacaacgtcggcgggcagatggccaccaacaaccagagctccaccactgcccccgcgaccggcacgtacaacctccaggaaatcgtgcccggcagcgtgtggatggagagggacgtgtacctccaaggacccatctgggccaagatcccagagacgggggcgcactttcacccctctccggccatgggcggattcggactcaaacacccaccgcccatgatgctcatcaagaacacgcctgtgcccggaaatatcaccagcttctcggacgtgcccgtcagcagcttcatcacccagtacagcaccgggcaggtcaccgtggagatggagtgggagctcaagaaggaaaactccaagaggtggaacccagagatccagtacacaaacaactacaacgacccccagtttgtggactttgccccggacagcaccggggaatacagaaccaccagacctatcggaacccgataccttacccgacccctttaa

SEQ ID NO: 199440 - protein, 736 aa, synthetic construct
MAADGYLPDWLEDNLSEGIREWWDLKPGAPKPKANQQKQDDGRGLVLPGYKYLGPFNGLDKGEPVNAADAAALEHDKAYDQQLKAGDNPYLRYNHADAEFQERLQEDTSFGGNLGRAVFQAKKRVLEPFGLVEEGAKTAPGKKRPVEQSPQEPDSSSGIGKTGQQPAKKRLNFGQTGDSESVPDPQPLGEPPATPAAVGPTTMASGGGAPMADNNEGADGVGNASGNWHCDSTWLGDRVITTSTRTWALPTYNNHLYKQISSASTGASNDNHYFGYSTPWGYFDFNRFHCHFSPRDWQRLINNNWGFRPKRLNFKLFNIQVKEVTTNDGVTTIANNLTSTVQVFSDSEYQLPYVLGSAHQGCLPPFPADVFMIPQYGYLTLNNGSQAVGRSSFYCLEYFPSQMLRTGNNFTFSYTFEDVPFHSSYAHSQSLDRLMNPLIDQYLYYLNRTQNQSGSAQNKDLLFSRGSPAGMSVQPKNWLPGPCYRQQRVSKTKTDNNNSNFTWTGASKYNLNGRESIINPGTAMASHKDDKDKFFPMSGVMIFGKESAGASNTALDNVMITDEEEIKATNPVATERFGTVAVNLQSSSTDPATGDVHVMGALPGMVWQDRDVYLQGPIWAKIPHTDGHFHPSPLMGGFGLKHPPPQILIKNTPVPANPPAEFSATKFASFITQYSTGQVSVEIEWELQKENSKRWNPEVQYTSNYAKSANVDFTVDNNGLYTEPRPIGTRYLTRPL

SEQ ID NO: 199441 - DNA, 2211 bp, synthetic construct
  source 1..2211: mol_type = other DNA
atggctgccgatggttatcttccagattggctcgaggacaacctctctgagggcattcgcgagtggtgggacttgaaacctggagccccgaaacccaaagccaaccagcaaaagcaggacgacggccggggtctggtgcttcctggctacaagtacctcggacccttcaacggactcgacaagggggagcccgtcaacgcggcggatgcagcggccctcgagcacgacaaggcctacgaccagcagctcaaagcgggtgacaatccgtacctgcggtataaccacgccgacgccgagtttcaggagcgtctgcaagaagatacgtcttttgggggcaacctcgggcgagcagtcttccaggccaagaagagggttctcgaaccttttggtctggttgaggaaggtgctaagacggctcctggaaagaaacgtccggtagagcagtcgccacaagagccagactcctcctcgggcattggcaagacaggccagcagcccgctaaaaagagactcaattttggtcagactggcgactcagagtcagtccccgacccacaacctctcggagaacctccagcaacccccgctgctgtgggacctactacaatggcttcaggcggtggcgcaccaatggcagacaataacgaaggcgccgacggagtgggtaatgcctcaggaaattggcattgcgattccacatggctgggcgacagagtcatcaccaccagcacccgaacatgggccttgcccacctataacaaccacctctacaagcaaatctccagtgcttcaacgggggccagcaacgacaaccactacttcggctacagcaccccctgggggtattttgatttcaacagattccactgccatttctcaccacgtgactggcagcgactcatcaacaacaattggggattccggcccaagagactcaacttcaagctcttcaacatccaagtcaaggaggtcacgacgaatgatggcgtcacgaccatcgctaataaccttaccagcacggttcaagtcttctcggactcggagtaccagttgccgtacgtcctcggctctgcgcaccagggctgcctccctccgttcccggcggacgtgttcatgattccgcagtacggctacctaacgctcaacaatggcagccaggcagtgggacggtcatccttttactgcctggaatatttcccatcgcagatgctgagaacgggcaataactttaccttcagctacaccttcgaggacgtgcctttccacagcagctacgcgcacagccagagcctggaccggctgatgaatcctctcatcgaccagtacctgtattacctgaacagaactcagaatcagtccggaagtgcccaaaacaaggacttgctgtttagccgggggtctccagctggcatgtctgttcagcccaaaaactggctacctggaccctgttaccggcagcagcgcgtttctaaaacaaaaacagacaacaacaacagcaactttacctggactggtgcttcaaaatataaccttaatgggcgtgaatctataatcaaccctggcactgctatggcctcacacaaagacgacaaagacaagttctttcccatgagcggtgtcatgatttttggaaaggagagcgccggagcttcaaacactgcattggacaatgtcatgatcacagacgaagaggaaatcaaagccactaaccccgtggccaccgaaagatttgggactgtggcagtcaatctccagagcagcagcacagaccctgcgaccggagatgtgcatgttatgggagccttacctggaatggtgtggcaagacagagacgtatacctgcagggtcctatttgggccaaaattcctcacacggatggacactttcacccgtctcctctcatgggcggctttggacttaagcacccgcctcctcagatcctcatcaaaaacacgcctgttcctgcgaatcctccggcagagttttcggctacaaagtttgcttcattcatcacccagtattccacaggacaagtgagcgtggagattgaatgggagctgcagaaagaaaacagcaaacgctggaatcccgaagtgcagtatacatctaactatgcaaaatctgccaacgttgatttcactgtggacaacaatggactttatactgagcctcgccccattggcacccgttacctcacccgtcccctgtaa

SEQ ID NO: 199442 - protein, 737 aa, synthetic construct
MAADGYLPDWLEDNLSEGIREWWDLKPGAPKPKANQQKQDNGRGLVLPGYKYLGPFNGLDKGEPVNAADAAALEHDKAYDQQLKAGDNPYLRYNHADAEFQERLQEDTSFGGNLGRAVFQAKKRVLEPLGLVEEGAKTAPAKKRPVEPSPQRSPDSSTGIGKKGQQPARKRLNFGQTGDSESVPDPQPLGEPPAAPSSVGSGTVAAGGGAPMADNNEGADGVGNASGNWHCDSTWLGDRVITTSTRTWALPTYNNHLYKQISSETAGSTNDNTYFGYSTPWGYFDFNRFHCHFSPRDWQRLINNNWGFRPKKLRFKLFNIQVKEVTTNDGVTTIANNLTSTIQVFSDSEYQLPYVLGSAHQGCLPPFPADVFMIPQYGYLTLNNGSQSVGRSSFYCLEYFPSQMLRTGNNFEFSYSFEDVPFHSSYAHSQSLDRLMNPLIDQYLYYLARTQSNPGGTAGNRELQFYQGGPSTMAEQAKNWLPGPCFRQQRVSKTLDQNNNSNFAWTGATKYHLNGRNSLVNPGVAMATHKDDEDRFFPSSGVLIFGKTGATNKTTLENVLMTNEEEIRPTNPVATEEYGIVSSNLQAANTAAQTQVVNNQGALPGMVWQNRDVYLQGPIWAKIPHTDGNFHPSPLMGGFGLKHPPPQILIKNTPVPANPPEVFTPAKFASFITQYSTGQVSVEIEWELQKENSKRWNPEIQYTSNFEKQTGVDFAVDSQGVYSEPRPIGTRYLTRNL

SEQ ID NO: 199443 - DNA, 2214 bp, synthetic construct
  source 1..2214: mol_type = other DNA
atggctgccgatggttatcttccagattggctcgaggacaacctctctgagggcattcgcgagtggtgggacctgaaacctggagccccgaaacccaaagccaaccagcaaaagcaggacaacggccggggtctggtgcttcctggctacaagtacctcggacccttcaacggactcgacaagggggagcccgtcaacgcggcggacgcagcggccctcgagcacgacaaggcctacgaccagcagctcaaagcgggtgacaatccgtacctgcggtataaccacgccgacgccgagtttcaggagcgtctgcaagaagatacgtcatttgggggcaacctcgggcgagcagtcttccaggccaagaagcgggttctcgaacctctcggtctggttgaggaaggcgctaagacggctcctgcaaagaagagaccggtagagccgtcacctcagcgttcccccgactcctccacgggcatcggcaagaaaggccagcagcccgccagaaagagactcaatttcggtcagactggcgactcagagtcagtccccgaccctcaacctctcggagaacctccagcagcgccctctagtgtgggatctggtacagtggctgcaggcggtggcgcaccaatggcagacaataacgaaggtgccgacggagtgggtaatgcctcaggaaattggcattgcgattccacatggctgggcgacagagtcattaccaccagcacccgaacctgggccctgcccacctacaacaaccacctctacaagcaaatctccagtgaaactgcaggtagtaccaacgacaacacctacttcggctacagcaccccctgggggtattttgactttaacagattccactgccacttctcaccacgtgactggcagcgactcatcaacaacaactggggattccggcccaagaagctgcggttcaagctcttcaacatccaggtcaaggaggtcacgacgaatgacggcgttacgaccatcgctaataaccttaccagcacgattcaggtattctcggactcggaataccagctgccgtacgtcctcggctctgcgcaccagggctgcctgcctccgttcccggcggacgtcttcatgattcctcagtacggctacctgactctcaacaatggcagtcagtctgtgggacgttcctccttctactgcctggagtacttcccctctcagatgctgagaacgggcaacaactttgagttcagctacagcttcgaggacgtgcctttccacagcagctacgcacacagccagagcctggaccggctgatgaatcccctcatcgaccagtacttgtactacctggccagaacacagagtaacccaggaggcacagctggcaatcgggaactgcagttttaccagggcgggccttcaactatggccgaacaagccaagaattggttacctggaccttgcttccggcaacaaagagtctccaaaacgctggatcaaaacaacaacagcaactttgcttggactggtgccaccaaatatcacctgaacggcagaaactcgttggttaatcccggcgtcgccatggcaactcacaaggacgacgaggaccgctttttcccatccagcggagtcctgatttttggaaaaactggagcaactaacaaaactacattggaaaatgtgttaatgacaaatgaagaagaaattcgtcctactaatcctgtagccacggaagaatacgggatagtcagcagcaacttacaagcggctaatactgcagcccagacacaagttgtcaacaaccagggagccttacctggcatggtctggcagaaccgggacgtgtacctgcagggtcccatctgggccaagattcctcacacggatggcaactttcacccgtctcctttgatgggcggctttggacttaaacatccgcctcctcagatcctgatcaagaacactcccgttcccgctaatcctccggaggtgtttactcctgccaagtttgcttcgttcatcacacagtacagcaccggacaagtcagcgtggaaatcgagtgggagctgcagaaggaaaacagcaagcgctggaacccggagattcagtacacctccaactttgaaaagcagactggtgtggactttgccgttgacagccagggtgtttactctgagcctcgccctattggcactcgttacctcacccgtaatctgtaa

SEQ ID NO: 199444 - protein, 738 aa, synthetic construct
MAADGYLPDWLEDNLSEGIREWWALKPGAPKPKANQQKQDDGRGLVLPGYKYLGPFNGLDKGEPVNAADAAALEHDKAYDQQLQAGDNPYLRYNHADAEFQERLQEDTSFGGNLGRAVFQAKKRVLEPLGLVEEGAKTAPGKKRPVEPSPQRSPDSSTGIGKKGQQPARKRLNFGQTGDSESVPDPQPLGEPPAAPSGVGPNTMAAGGGAPMADNNEGADGVGSSSGNWHCDSTWLGDRVITTSTRTWALPTYNNHLYKQISNGTSGGATNDNTYFGYSTPWGYFDFNRFHCHFSPRDWQRLINNNWGFRPKRLSFKLFNIQVKEVTQNEGTKTIANNLTSTIQVFTDSEYQLPYVLGSAHQGCLPPFPADVFMIPQYGYLTLNNGSQAVGRSSFYCLEYFPSQMLRTGNNFQFTYTFEDVPFHSSYAHSQSLDRLMNPLIDQYLYYLSRTQTTGGTANTQTLGFSQGGPNTMANQAKNWLPGPCYRQQRVSTTTGQNNNSNFAWTAGTKYHLNGRNSLANPGIAMATHKDDEERFFPSNGILIFGKQNAARDNADYSDVMLTSEEEIKTTNPVATEEYGIVADNLQQQNTAPQIGTVNSQGALPGMVWQNRDVYLQGPIWAKIPHTDGNFHPSPLMGGFGLKHPPPQILIKNTPVPADPPTTFNQSKLNSFITQYSTGQVSVEIEWELQKENSKRWNPEIQYTSNYYKSTSVDFAVNTEGVYSEPRPIGTRYLTRNL

SEQ ID NO: 199445 - DNA, 2217 bp, synthetic construct
  source 1..2217: mol_type = other DNA
atggctgccgatggttatcttccagattggctcgaggacaacctctctgagggcattcgcgagtggtgggcgctgaaacctggagccccgaagcccaaagccaaccagcaaaagcaggacgacggccggggtctggtgcttcctggctacaagtacctcggacccttcaacggactcgacaagggggagcccgtcaacgcggcggacgcagcggccctcgagcacgacaaggcctacgaccagcagctgcaggcgggtgacaatccgtacctgcggtataaccacgccgacgccgagtttcaggagcgtctgcaagaagatacgtcttttgggggcaacctcgggcgagcagtcttccaggccaagaagcgggttctcgaacctctcggtctggttgaggaaggcgctaagacggctcctggaaagaagagaccggtagagccatcaccccagcgttctccagactcctctacgggcatcggcaagaaaggccaacagcccgccagaaaaagactcaattttggtcagactggcgactcagagtcagttccagaccctcaacctctcggagaacctccagcagcgccctctggtgtgggacctaatacaatggctgcaggcggtggcgcaccaatggcagacaataacgaaggcgccgacggagtgggtagttcctcgggaaattggcattgcgattccacatggctgggcgacagagtcatcaccaccagcacccgaacctgggccctgcccacctacaacaaccacctctacaagcaaatctccaacgggacatcgggaggagccaccaacgacaacacctacttcggctacagcaccccctgggggtattttgactttaacagattccactgccacttttcaccacgtgactggcagcgactcatcaacaacaactggggattccggcccaagagactcagcttcaagctcttcaacatccaggtcaaggaggtcacgcagaatgaaggcaccaagaccatcgccaataacctcaccagcaccatccaggtgtttacggactcggagtaccagctgccgtacgttctcggctctgcccaccagggctgcctgcctccgttcccggcggacgtgttcatgattccccagtacggctacctaacactcaacaacggtagtcaggccgtgggacgctcctccttctactgcctggaatactttccttcgcagatgctgagaaccggcaacaacttccagtttacttacaccttcgaggacgtgcctttccacagcagctacgcccacagccagagcttggaccggctgatgaatcctctgattgaccagtacctgtactacttgtctcggactcaaacaacaggaggcacggcaaatacgcagactctgggcttcagccaaggtgggcctaatacaatggccaatcaggcaaagaactggctgccaggaccctgttaccgccaacaacgcgtctcaacgacaaccgggcaaaacaacaatagcaactttgcctggactgctgggaccaaataccatctgaatggaagaaattcattggctaatcctggcatcgctatggcaacacacaaagacgacgaggagcgtttttttcccagtaacgggatcctgatttttggcaaacaaaatgctgccagagacaatgcggattacagcgatgtcatgctcaccagcgaggaagaaatcaaaaccactaaccctgtggctacagaggaatacggtatcgtggcagataacttgcagcagcaaaacacggctcctcaaattggaactgtcaacagccagggggccttacccggtatggtctggcagaaccgggacgtgtacctgcagggtcccatctgggccaagattcctcacacggacggcaacttccacccgtctccgctgatgggcggctttggcctgaaacatcctccgcctcagatcctgatcaagaacacgcctgtacctgcggatcctccgaccaccttcaaccagtcaaagctgaactctttcatcacgcaatacagcaccggacaggtcagcgtggaaattgaatgggagctgcagaaggaaaacagcaagcgctggaaccccgagatccagtacacctccaactactacaaatctacaagtgtggactttgctgttaatacagaaggcgtgtactctgaaccccgccccattggcacccgttacctcacccgtaatctgtaa

SEQ ID NO: 199446 - protein, 736 aa, synthetic construct
MAADGYLPDWLEDNLSEGIREWWALKPGAPQPKANQQHQDNARGLVLPGYKYLGPGNGLDKGEPVNAADAAALEHDKAYDQQLKAGDNPYLKYNHADAEFQERLKEDTSFGGNLGRAVFQAKKRLLEPLGLVEEAAKTAPGKKRPVEQSPQEPDSSAGIGKSGAQPAKKRLNFGQTGDTESVPDPQPIGEPPAAPSGVGSLTMASGGGAPVADNNEGADGVGSSSGNWHCDSQWLGDRVITTSTRTWALPTYNNHLYKQISNSTSGGSSNDNAYFGYSTPWGYFDFNRFHCHFSPRDWQRLINNNWGFRPKRLNFKLFNIQVKEVTDNNGVKTIANNLTSTVQVFTDSDYQLPYVLGSAHEGCLPPFPADVFMIPQYGYLTLNDGSQAVGRSSFYCLEYFPSQMLRTGNNFQFSYEFENVPFHSSYAHSQSLDRLMNPLIDQYLYYLSRTINGSGQNQQTLKFSVAGPSNMAVQGRNYIPGPSYRQQRVSTTVTQNNNSEFAWPGASSWALNGRNSLMNPGPAMASHKEGEDRFFPLSGSLIFGKQGTGRDNVDADKVMITNEEEIKTTNPVATESYGQVATNHQSAQAQAQTGWVQNQGILPGMVWQDRDVYLQGPIWAKIPHTDGNFHPSPLMGGFGMKHPPPQILIKNTPVPADPPTAFNKDKLNSFITQYSTGQVSVEIEWELQKENSKRWNPEIQYTSNYYKSNNVEFAVNTEGVYSEPRPIGTRYLTRNL

SEQ ID NO: 199447 - DNA, 2211 bp, synthetic construct
  source 1..2211: mol_type = other DNA
atggctgccgatggttatcttccagattggctcgaggacaaccttagtgaaggaattcgcgagtggtgggctttgaaacctggagcccctcaacccaaggcaaatcaacaacatcaagacaacgctcgaggtcttgtgcttccgggttacaaataccttggacccggcaacggactcgacaagggggagccggtcaacgcagcagacgcggcggccctcgagcacgacaaggcctacgaccagcagctcaaggccggagacaacccgtacctcaagtacaaccacgccgacgccgagttccaggagcggctcaaagaagatacgtcttttgggggcaacctcgggcgagcagtcttccaggccaaaaagaggcttcttgaacctcttggtctggttgaggaagcggctaagacggctcctggaaagaagaggcctgtagagcagtctcctcaggaaccggactcctccgcgggtattggcaaatcgggtgcacagcccgctaaaaagagactcaatttcggtcagactggcgacacagagtcagtcccagaccctcaaccaatcggagaacctcccgcagccccctcaggtgtgggatctcttacaatggcttcaggtggtggcgcaccagtggcagacaataacgaaggtgccgatggagtgggtagttcctcgggaaattggcattgcgattcccaatggctgggggacagagtcatcaccaccagcacccgaacctgggccctgcccacctacaacaatcacctctacaagcaaatctccaacagcacatctggaggatcttcaaatgacaacgcctacttcggctacagcaccccctgggggtattttgacttcaacagattccactgccacttctcaccacgtgactggcagcgactcatcaacaacaactggggattccggcctaagcgactcaacttcaagctcttcaacattcaggtcaaagaggttacggacaacaatggagtcaagaccatcgccaataaccttaccagcacggtccaggtcttcacggactcagactatcagctcccgtacgtgctcgggtcggctcacgagggctgcctcccgccgttcccagcggacgttttcatgattcctcagtacgggtatctgacgcttaatgatggaagccaggccgtgggtcgttcgtccttttactgcctggaatatttcccgtcgcaaatgctaagaacgggtaacaacttccagttcagctacgagtttgagaacgtacctttccatagcagctacgctcacagccaaagcctggaccgactaatgaatccactcatcgaccaatacttgtactatctctctagaactattaacggttctggacagaatcaacaaacgctaaaattcagtgtggccggacccagcaacatggctgtccagggaagaaactacatacctggacccagctaccgacaacaacgtgtctcaaccactgtgactcaaaacaacaacagcgaatttgcttggcctggagcttcttcttgggctctcaatggacgtaatagcttgatgaatcctggacctgctatggccagccacaaagaaggagaggaccgtttctttcctttgtctggatctttaatttttggcaaacaaggtaccggcagagacaacgtggatgcggacaaagtcatgataaccaacgaagaagaaattaaaactactaacccggtagcaacggagtcctatggacaagtggccacaaaccaccagagtgcacaagcgcaggctcaaaccggttgggttcaaaaccaaggaatacttccgggtatggtttggcaggacagagatgtgtacctgcaaggacccatttgggccaaaattcctcacacggacggcaactttcacccttctccgctgatgggagggtttggaatgaagcacccgcctcctcagatcctcatcaaaaacacacctgtacctgcggatcctccaacggccttcaacaaggacaagctgaactctttcatcacccagtattctactggccaagtcagcgtggagatcgagtgggagctgcagaaggaaaacagcaagcgctggaacccggagatccagtacacttccaactattacaagtctaataatgttgaatttgctgttaatactgaaggtgtatatagtgaaccccgccccattggcaccagatacctgactcgtaatctgtaa

SEQ ID NO: 199448 - protein, 736 aa, synthetic construct
MAADGYLPDWLEDNLSEGIREWWALKPGAPQPKANQQHQDNARGLVLPGYKYLGPGNGLDKGEPVNAADAAALEHDKAYDQQLKAGDNPYLKYNHADAEFQERLKEDTSFGGNLGRAVFQAKKRLLEPLGLVEEAAKTAPGKKRPVEQSPQEPDSSAGIGKSGAQPAKKRLNFGQTGDTESVPDPQPIGEPPAAPSGVGSLTMASGGGAPVADNNEGADGVGSSSGNWHCDSQWLGDRVITTSTRTWALPTYNNHLYKQISNSTSGGSSNDNAYFGYSTPWGYFDFNRFHCHFSPRDWQRLINNNWGFRPKRLNFKLFNIQVKEVTDNNGVKTIANNLTSTVQVFTDSDYQLPYVLGSAHEGCLPPFPADVFMIPQYGYLTLNDGSQAVGRSSFYCLEYFPSQMLRTGNNFQFSYEFENVPFHSSYAHSQSLDRLMNPLIDQYLYYLSKTINGSGQNQQTLKFSVAGPSNMAVQGRNYIPGPSYRQQRVSTTVTQNNNSEFAWPGASSWALNGRNSLMNPGPAMASHKEGEDRFFPLSGSLIFGKQGTGRDNVDADKVMITNEEEIKTTNPVATESYGQVATNHQSAQAQAQTGWVQNQGILPGMVWQDRDVYLQGPIWAKIPHTDGNFHPSPLMGGFGMKHPPPQILIKNTPVPADPPTAFNKDKLNSFITQYSTGQVSVEIEWELQKENSKRWNPEIQYTSNYYKSNNVEFAVNTEGVYSEPRPIGTRYLTRNL

SEQ ID NO: 199449 - DNA, 2211 bp, synthetic construct
  source 1..2211: mol_type = other DNA
atggctgccgatggttatcttccagattggctcgaggacaaccttagtgaaggaattcgcgagtggtgggctttgaaacctggagcccctcaacccaaggcaaatcaacaacatcaagacaacgctcgaggtcttgtgcttccgggttacaaataccttggacccggcaacggactcgacaagggggagccggtcaacgcagcagacgcggcggccctcgagcacgacaaggcctacgaccagcagctcaaggccggagacaacccgtacctcaagtacaaccacgccgacgccgagttccaggagcggctcaaagaagatacgtcttttgggggcaacctcgggcgagcagtcttccaggccaaaaagaggcttcttgaacctcttggtctggttgaggaagcggctaagacggctcctggaaagaagaggcctgtagagcagtctcctcaggaaccggactcctccgcgggtattggcaaatcgggtgcacagcccgctaaaaagagactcaatttcggtcagactggcgacacagagtcagtcccagaccctcaaccaatcggagaacctcccgcagccccctcaggtgtgggatctcttacaatggcttcaggtggtggcgcaccagtggcagacaataacgaaggtgccgatggagtgggtagttcctcgggaaattggcattgcgattcccaatggctgggggacagagtcatcaccaccagcacccgaacctgggccctgcccacctacaacaatcacctctacaagcaaatctccaacagcacatctggaggatcttcaaatgacaacgcctacttcggctacagcaccccctgggggtattttgacttcaacagattccactgccacttctcaccacgtgactggcagcgactcatcaacaacaactggggattccggcctaagcgactcaacttcaagctcttcaacattcaggtcaaagaggttacggacaacaatggagtcaagaccatcgccaataaccttaccagcacggtccaggtcttcacggactcagactatcagctcccgtacgtgctcgggtcggctcacgagggctgcctcccgccgttcccagcggacgttttcatgattcctcagtacgggtatctgacgcttaatgatggaagccaggccgtgggtcgttcgtccttttactgcctggaatatttcccgtcgcaaatgctaagaacgggtaacaacttccagttcagctacgagtttgagaacgtacctttccatagcagctacgctcacagccaaagcctggaccgactaatgaatccactcatcgaccaatacttgtactatctctcaaagactattaacggttctggacagaatcaacaaacgctaaaattcagtgtggccggacccagcaacatggctgtccagggaagaaactacatacctggacccagctaccgacaacaacgtgtctcaaccactgtgactcaaaacaacaacagcgaatttgcttggcctggagcttcttcttgggctctcaatggacgtaatagcttgatgaatcctggacctgctatggccagccacaaagaaggagaggaccgtttctttcctttgtctggatctttaatttttggcaaacaaggaactggaagagacaacgtggatgcggacaaagtcatgataaccaacgaagaagaaattaaaactactaacccggtagcaacggagtcctatggacaagtggccacaaaccaccagagtgcccaagcacaggcgcagaccggctgggttcaaaaccaaggaatacttccgggtatggtttggcaggacagagatgtgtacctgcaaggacccatttgggccaaaattcctcacacggacggcaactttcacccttctccgctgatgggagggtttggaatgaagcacccgcctcctcagatcctcatcaaaaacacacctgtacctgcggatcctccaacggccttcaacaaggacaagctgaactctttcatcacccagtattctactggccaagtcagcgtggagatcgagtgggagctgcagaaggaaaacagcaagcgctggaacccggagatccagtacacttccaactattacaagtctaataatgttgaatttgctgttaatactgaaggtgtatatagtgaaccccgccccattggcaccagatacctgactcgtaatctgtaa

SEQ ID NO: 199450 - protein, 738 aa, synthetic construct
MAADGYLPDWLEDNLSEGIREWWDLKPGAPKPKANQQKQDDGRGLVLPGYKYLGPFNGLDKGEPVNAADAAALEHDKAYDQQLKAGDNPYLRYNHADAEFQERLQEDTSFGGNLGRAVFQAKKRVLEPLGLVEEGAKTAPGKKRPVEPSPQRSPDSSTGIGKKGQQPAKKRLNFGQTGDSESVPDPQPIGEPPAGPSGLGSGTMAAGGGAPMADNNEGADGVGSSSGNWHCDSTWLGDRVITTSTRTWALPTYNNHLYKQISNGTSGGSTNDNTYFGYSTPWGYFDFNRFHCHFSPRDWQRLINNNWGFRPKRLNFKLFNIQVKEVTQNEGTKTIANNLTSTIQVFTDSEYQLPYVLGSAHQGCLPPFPADVFMIPQYGYLTLNNGSQAVGRSSFYCLEYFPSQMLRTGNNFEFSYQFEDVPFHSSYAHSQSLDRLMNPLIDQYLYYLSRTQSTGGTAGTQQLLFSQAGPNNMSAQAKNWLPGPCYRQQRVSTTLSQNNNSNFAWTGATKYHLNGRDSLVNPGVAMATHKDDEERFFPSSGVLMFGKQGAGKDNVDYSSVMLTSEEEIKTTNPVATEQYGVVADNLQQQNAAPIVGAVNSQGALPGMVWQNRDVYLQGPIWAKIPHTDGNFHPSPLMGGFGLKHPPPQILIKNTPVPADPPTTFSQAKLASFITQYSTGQVSVEIEWELQKENSKRWNPEIQYTSNYYKSTNVDFAVNTDGTYSEPRPIGTRYLTRNL

SEQ ID NO: 199451 - DNA, 2217 bp, synthetic construct
  source 1..2217: mol_type = other DNA
atggctgccgatggttatcttccagattggctcgaggacaacctctctgagggcattcgcgagtggtgggacttgaaacctggagccccgaaacccaaagccaaccagcaaaagcaggacgacggccggggtctggtgcttcctggctacaagtacctcggacccttcaacggactcgacaagggggagcccgtcaacgcggcggacgcagcggccctcgagcacgacaaggcctacgaccagcagctcaaagcgggtgacaatccgtacctgcggtataaccacgccgacgccgagtttcaggagcgtctgcaagaagatacgtcttttgggggcaacctcgggcgagcagtcttccaggccaagaagcgggttctcgaacctctcggtctggttgaggaaggcgctaagacggctcctggaaagaagagaccggtagagccatcaccccagcgttctccagactcctctacgggcatcggcaagaaaggccagcagcccgcgaaaaagagactcaactttgggcagactggcgactcagagtcagtgcccgaccctcaaccaatcggagaaccccccgcaggcccctctggtctgggatctggtacaatggctgcaggcggtggcgctccaatggcagacaataacgaaggcgccgacggagtgggtagttcctcaggaaattggcattgcgattccacatggctgggcgacagagtcatcaccaccagcacccgaacctgggccctccccacctacaacaaccacctctacaagcaaatctccaacgggacttcgggaggaagcaccaacgacaacacctacttcggctacagcaccccctgggggtattttgactttaacagattccactgccacttctcaccacgtgactggcagcgactcatcaacaacaactggggattccggcccaagagactcaacttcaagctcttcaacatccaggtcaaggaggtcacgcagaatgaaggcaccaagaccatcgccaataaccttaccagcacgattcaggtctttacggactcggaataccagctcccgtacgtcctcggctctgcgcaccagggctgcctgcctccgttcccggcggacgtcttcatgattcctcagtacgggtacctgactctgaacaatggcagtcaggccgtgggccgttcctccttctactgcctggagtactttccttctcaaatgctgagaacgggcaacaactttgagttcagctaccagtttgaggacgtgccttttcacagcagctacgcgcacagccaaagcctggaccggctgatgaaccccctcatcgaccagtacctgtactacctgtctcggactcagtccacgggaggtaccgcaggaactcagcagttgctattttctcaggccgggcctaataacatgtcggctcaggccaaaaactggctacccgggccctgctaccggcagcaacgcgtctccacgacactgtcgcaaaataacaacagcaactttgcctggaccggtgccaccaagtatcatctgaatggcagagactctctggtaaatcccggtgtcgctatggcaacccacaaggacgacgaagagcgattttttccgtccagcggagtcttaatgtttgggaaacagggagctggaaaagacaacgtggactatagcagcgttatgctaaccagtgaggaagaaattaaaaccaccaacccagtggccacagaacagtacggcgtggtggccgataacctgcaacagcaaaacgccgctcctattgtaggggccgtcaacagtcaaggagccttacctggcatggtctggcagaaccgggacgtgtacctgcagggtcctatctgggccaagattcctcacacggacggaaactttcatccctcgccgctgatgggaggctttggactgaaacacccgcctcctcagatcctgattaagaatacacctgttcccgcggatcctccaactaccttcagtcaagctaagctggcgtcgttcatcacgcagtacagcaccggacaggtcagcgtggaaattgaatgggagctgcagaaagaaaacagcaaacgctggaacccagagattcaatacacttccaactactacaaatctacaaatgtggactttgctgttaacacagatggcacttattctgagcctcgccccatcggcacccgttacctcacccgtaatctgtaa

SEQ ID NO: 199452 - protein, 736 aa, synthetic construct
MAADGYLPDWLEDNLSEGIREWWDLKPGAPKPKANQQKQDDGRGLVLPGYKYLGPFNGLDKGEPVNAADAAALEHDKAYDQQLKAGDNPYLRYNHADAEFQERLQEDTSFGGNLGRAVFQAKKRVLEPLGLVEEGAKTAPGKKRPVEQSPQEPDSSSGIGKTGQQPAKKRLNFGQTGDSESVPDPQPLGEPPAAPSGLGPNTMASGGGAPMADNNEGADGVGNSSGNWHCDSTWLGDRVITTSTRTWALPTYNNHLYKQISNGTSGGSTNDNTYFGYSTPWGYFDFNRFHCHFSPRDWQRLINNNWGFRPKRLNFKLFNIQVKEVTTNEGTKTIANNLTSTVQVFTDSEYQLPYVLGSAHQGCLPPFPADVFMVPQYGYLTLNNGSQALGRSSFYCLEYFPSQMLRTGNNFQFSYTFEDVPFHSSYAHSQSLDRLMNPLIDQYLYYLVRTQTTGTGGTQTLAFSQAGPSSMANQARNWVPGPCYRQQRVSTTTNQNNNSNFAWTGAAKFKLNGRDSLMNPGVAMASHKDDDDRFFPSSGVLIFGKQGAGNDGVDYSQVLITDEEEIKATNPVATEEYGAVAINNQAANTQAQTGLVHNQGVIPGMVWQNRDVYLQGPIWAKIPHTDGNFHPSPLMGGFGLKHPPPQILIKNTPVPADPPLTFNQAKLNSFITQYSTGQVSVEIEWELQKENSKRWNPEIQYTSNYYKSTNVDFAVNTEGVYSEPRPIGTRYLTRNL

SEQ ID NO: 199453 - DNA, 2211 bp, synthetic construct
  source 1..2211: mol_type = other DNA
atggctgccgatggttatcttccagattggctcgaggacaacctctctgagggcattcgcgagtggtgggacttgaaacctggagccccgaaacccaaagccaaccagcaaaagcaggacgacggccggggtctggtgcttcctggctacaagtacctcggacccttcaacggactcgacaagggggagcccgtcaacgcggcggacgcagcggccctcgagcacgacaaagcctacgaccagcagctcaaagcgggtgacaatccgtacctgcggtataatcacgccgacgccgagtttcaggagcgtctgcaagaagatacgtcttttgggggcaacctcgggcgagcagtcttccaggccaagaagcgggttctcgaacctctcggtctggttgaggaaggcgctaagacggctcctggaaagaagagaccggtagagcagtcgccacaagagccagactcctcctcgggcatcggcaagacaggccagcagcccgctaaaaagagactcaattttggtcagactggcgactcagagtcagtccccgacccacaacctctcggagaacctccagcagccccctcaggtctgggacctaatacaatggcttcaggcggtggcgctccaatggcagacaataacgaaggcgccgacggagtgggtaattcctcgggaaattggcattgcgattccacatggctgggggacagagtcatcaccaccagcacccgaacctgggccctgcccacctacaacaaccacctctacaagcaaatctccaacggcacctcgggaggaagcaccaacgacaacacctattttggctacagcaccccctgggggtattttgacttcaacagattccactgtcacttttcaccacgtgactggcaacgactcatcaacaacaattggggattccggcccaaaagactcaacttcaagctgttcaacatccaggtcaaggaagtcacgacgaacgaaggcaccaagaccatcgccaataatctcaccagcaccgtgcaggtctttacggactcggagtaccagttaccgtacgtgctaggatccgctcaccagggatgtctgcctccgttcccggcggacgtcttcatggttcctcagtacggctatttaactttaaacaatggaagccaagccctgggacgttcctccttctactgtctggagtatttcccatcgcagatgctgagaaccggcaacaactttcagttcagctacaccttcgaggacgtgcctttccacagcagctacgcgcacagccagagcctggacaggctgatgaatcccctcatcgaccagtacctgtactacctggtcagaacgcaaacgactggaactggagggacgcagactctggcattcagccaagcgggtcctagctcaatggccaaccaggctagaaattgggtgcccggaccttgctaccggcagcagcgcgtctccacgacaaccaaccagaacaacaacagcaactttgcctggacgggagctgccaagtttaagctgaacggccgagactctctaatgaatccgggcgtggcaatggcttcccacaaggatgacgacgaccgcttcttcccttcgagcggggtcctgatttttggcaagcaaggagccgggaacgatggagtggattacagccaagtgctgattacagatgaggaagaaatcaaggctaccaaccccgtggccacagaagaatatggagcagtggccatcaacaaccaggccgccaatacgcaggcgcagaccggactcgtgcacaaccagggggtgattcccggcatggtgtggcagaatagagacgtgtacctgcagggtcccatctgggccaaaattcctcacacggacggcaactttcacccgtctcccctgatgggcggctttggactgaagcacccgcctcctcaaattctcatcaagaacacaccggttccagcggacccgccgcttaccttcaaccaggccaagctgaactctttcatcacgcagtacagcaccggacaggtcagcgtggaaatcgagtgggagctgcagaaagaaaacagcaaacgctggaatccagagattcaatacacttccaactactacaaatctacaaatgtggactttgctgtcaacacggagggggtttatagcgagcctcgccccattggcacccgttacctcacccgcaacctgtaa

SEQ ID NO: 199454 - protein, 736 aa, synthetic construct
MAADGYLPDWLEDNLSEGIREWWALQPGAPKPKANQQHQDNARGLVLPGYKYLGPGNGLDKGEPVNAADAAALEHDKAYDQQLKAGDNPYLKYNHADAEFQERLKEDTSFGGNLGRAVFQAKKRLLEPLGLVEEAAKTAPGKKRPVDQSPQEPDSSSGVGKSGKQPARKRLNFGQTGDSESVPDPQPLGEPPAAPTSLGSNTMASGGGAPMADNNEGADGVGNSSGNWHCDSQWLGDRVITTSTRTWALPTYNNHLYKQISSQSGASNDNHYFGYSTPWGYFDFNRFHCHFSPRDWQRLINNNWGFRPKKLSFKLFNIQVKEVTQNDGTTTIANNLTSTVQVFTDSEYQLPYVLGSAHQGCLPPFPADVFMVPQYGYLTLNNGSQAVGRSSFYCLEYFPSQMLRTGNNFQFSYTFEDVPFHSSYAHSQSLDRLMNPLIDQYLYYLNRTQGTTSGTTNQSRLLFSQAGPQSMSLQARNWLPGPCYRQQRLSKTANDNNNSNFPWTAASKYHLNGRDSLVNPGPAMASHKDDEEKFFPMHGNLIFGKEGTTASNAELDNVMITDEEEIRTTNPVATEQYGTVANNLQSSNTAPTTRTVNDQGALPGMVWQDRDVYLQGPIWAKIPHTDGHFHPSPLMGGFGLKHPPPQIMIKNTPVPANPPTTFSPAKFASFITQYSTGQVSVEIEWELQKENSKRWNPEIQYTSNYNKSVNVDFTVDTNGVYSEPRPIGTRYLTRPL

SEQ ID NO: 199455 - DNA, 2211 bp, synthetic construct
  source 1..2211: mol_type = other DNA
atggctgctgacggttatcttccagattggctcgaggacaacctttctgaaggcattcgagagtggtgggcgctgcaacctggagcccctaaacccaaggcaaatcaacaacatcaggacaacgctcggggtcttgtgcttccgggttacaaatacctcggacccggcaacggactcgacaagggggaacccgtcaacgcagcggacgcggcagccctcgagcacgacaaggcctacgaccagcagctcaaggccggtgacaacccctacctcaagtacaaccacgccgacgccgagttccaggagcggctcaaagaagatacgtcttttgggggcaacctcgggcgagcagtcttccaggccaaaaagaggcttcttgaacctcttggtctggttgaggaagcggctaagacggctcctggaaagaagaggcctgtagatcagtctcctcaggaaccggactcatcatctggtgttggcaaatcgggcaaacagcctgccagaaaaagactaaatttcggtcagactggcgactcagagtcagtcccagaccctcaacctctcggagaaccaccagcagcccccacaagtttgggatctaatacaatggcttcaggcggtggcgcaccaatggcagacaataacgagggtgccgatggagtgggtaattcctcaggaaattggcattgcgattcccaatggctgggcgacagagtcatcaccaccagcaccagaacctgggccctgcccacttacaacaaccatctctacaagcaaatctccagccaatcaggagcttcaaacgacaaccactactttggctacagcaccccttgggggtattttgactttaacagattccactgccacttctcaccacgtgactggcagcgactcattaacaacaactggggattccggcccaagaaactcagcttcaagctcttcaacatccaagttaaagaggtcacgcagaacgatggcacgacgactattgccaataaccttaccagcacggttcaagtgtttacggactcggagtatcagctcccgtacgtgctcgggtcggcgcaccaaggctgtctcccgccgtttccagcggacgtcttcatggtccctcagtatggatacctcaccctgaacaacggaagtcaagcggtgggacgctcatccttttactgcctggagtacttcccttcgcagatgctaaggactggaaataacttccaattcagctataccttcgaggatgtaccttttcacagcagctacgctcacagccagagtttggatcgcttgatgaatcctcttattgatcagtatctgtactacctgaacagaacgcaaggaacaacctctggaacaaccaaccaatcacggctgctttttagccaggctgggcctcagtctatgtctttgcaggccagaaattggctacctgggccctgctaccggcaacagagactttcaaagactgctaacgacaacaacaacagtaactttccttggacagcggccagcaaatatcatctcaatggccgcgactcgctggtgaatccaggaccagctatggccagtcacaaggacgatgaagaaaaatttttccctatgcacggcaatctaatatttggcaaagaagggacaacggcaagtaacgcagaattagataatgtaatgattacggatgaagaagagattcgtaccaccaatcctgtggcaacagagcagtatggaactgtggcaaataacttgcagagctcaaatacagctcccacgactagaactgtcaatgatcagggggccttacctggcatggtgtggcaagatcgtgacgtgtaccttcaaggacctatctgggcaaagattcctcacacggatggacactttcatccttctcctctgatgggaggctttggactgaaacatccgcctcctcaaatcatgatcaaaaatactccggtaccggcaaatcctccgacgactttcagcccggccaagtttgcttcatttatcactcagtactccactggacaggtcagcgtggaaattgagtgggagctacagaaagaaaacagcaaacgttggaatccagagattcagtacacttccaactacaacaagtctgttaatgtggactttactgtagacactaatggtgtttatagtgaacctcgccccattggcacccgttaccttacccgtcccctgtaa

SEQ ID NO: 199456 - protein, 743 aa, synthetic construct
MAADGYLPDWLEDNLSEGIREWWALKPGAPQPKANQQHQDNARGLVLPGYKYLGPGNGLDKGEPVNAADAAALEHDKAYDQQLKAGDNPYLKYNHADAEFQERLKEDTSFGGNLGRAVFQAKKRLLEPLGLVEEAAKTAPGKKRPVEQSPQEPDSSAGIGKSGAQPAKKRLNFGQTGDTESVPDPQPIGEPPAAPSGVGSLTMASGGGAPVADNNEGADGVGSSSGNWHCDSQWLGDRVITTSTRTWALPTYNNHLYKQISNSTSGGSSNDNAYFGYSTPWGYFDFNRFHCHFSPRDWQRLINNNWGFRPKRLNFKLFNIQVKEVTDNNGVKTIANNLTSTVQVFTDSDYQLPYVLGSAHEGCLPPFPADVFMIPQYGYLTLNDGSQAVGRSSFYCLEYFPSQMLRTGNNFQFSYEFENVPFHSSYAHSQSLDRLMNPLIDQYLYYLSRTINGSGQNQQTLKFSVAGPSNMAVQGRNYIPGPSYRQQRVSTTVTQNNNSEFAWPGASSWALNGRNSLMNPGPAMASHKEGEDRFFPLSGSLIFGKQGTGRDNVDADKVMITNEEEIKTTNPVATESYGQVATNHQSAQRPNRDTSAQAQTGWVQNQGILPGMVWQDRDVYLQGPIWAKIPHTDGNFHPSPLMGGFGMKHPPPQILIKNTPVPADPPTAFNKDKLNSFITQYSTGQVSVEIEWELQKENSKRWNPEIQYTSNYYKSNNVEFAVNTEGVYSEPRPIGTRYLTRNL

SEQ ID NO: 199457 - protein, 743 aa, synthetic construct
MAADGYLPDWLEDNLSEGIREWWALKPGAPQPKANQQHQDNARGLVLPGYKYLGPGNGLDKGEPVNAADAAALEHDKAYDQQLKAGDNPYLKYNHADAEFQERLKEDTSFGGNLGRAVFQAKKRLLEPLGLVEEAAKTAPGKKRPVEQSPQEPDSSAGIGKSGAQPAKKRLNFGQTGDTESVPDPQPIGEPPAAPSGVGSLTMASGGGAPVADNNEGADGVGSSSGNWHCDSQWLGDRVITTSTRTWALPTYNNHLYKQISNSTSGGSSNDNAYFGYSTPWGYFDFNRFHCHFSPRDWQRLINNNWGFRPKRLNFKLFNIQVKEVTDNNGVKTIANNLTSTVQVFTDSDYQLPYVLGSAHEGCLPPFPADVFMIPQYGYLTLNDGSQAVGRSSFYCLEYFPSQMLRTGNNFQFSYEFENVPFHSSYAHSQSLDRLMNPLIDQYLYYLSRTINGSGQNQQTLKFSVAGPSNMAVQGRNYIPGPSYRQQRVSTTVTQNNNSEFAWPGASSWALNGRNSLMNPGPAMASHKEGEDRFFPLSGSLIFGKQGTGRDNVDADKVMITNEEEIKTTNPVATESYGQVATNHQSAQMDGQRRIAQAQTGWVQNQGILPGMVWQDRDVYLQGPIWAKIPHTDGNFHPSPLMGGFGMKHPPPQILIKNTPVPADPPTAFNKDKLNSFITQYSTGQVSVEIEWELQKENSKRWNPEIQYTSNYYKSNNVEFAVNTEGVYSEPRPIGTRYLTRNL

SEQ ID NO: 199458 - protein, 743 aa, synthetic construct
MAADGYLPDWLEDNLSEGIREWWALKPGAPQPKANQQHQDNARGLVLPGYKYLGPGNGLDKGEPVNAADAAALEHDKAYDQQLKAGDNPYLKYNHADAEFQERLKEDTSFGGNLGRAVFQAKKRLLEPLGLVEEAAKTAPGKKRPVEQSPQEPDSSAGIGKSGAQPAKKRLNFGQTGDTESVPDPQPIGEPPAAPSGVGSLTMASGGGAPVADNNEGADGVGSSSGNWHCDSQWLGDRVITTSTRTWALPTYNNHLYKQISNSTSGGSSNDNAYFGYSTPWGYFDFNRFHCHFSPRDWQRLINNNWGFRPKRLNFKLFNIQVKEVTDNNGVKTIANNLTSTVQVFTDSDYQLPYVLGSAHEGCLPPFPADVFMIPQYGYLTLNDGSQAVGRSSFYCLEYFPSQMLRTGNNFQFSYEFENVPFHSSYAHSQSLDRLMNPLIDQYLYYLSRTINGSGQNQQTLKFSVAGPSNMAVQGRNYIPGPSYRQQRVSTTVTQNNNSEFAWPGASSWALNGRNSLMNPGPAMASHKEGEDRFFPLSGSLIFGKQGTGRDNVDADKVMITNEEEIKTTNPVATESYGQVATNHQSAQETNRAGRAQAQTGWVQNQGILPGMVWQDRDVYLQGPIWAKIPHTDGNFHPSPLMGGFGMKHPPPQILIKNTPVPADPPTAFNKDKLNSFITQYSTGQVSVEIEWELQKENSKRWNPEIQYTSNYYKSNNVEFAVNTEGVYSEPRPIGTRYLTRNL

SEQ ID NO: 199459 - protein, 743 aa, synthetic construct
MAADGYLPDWLEDNLSEGIREWWALKPGAPQPKANQQHQDNARGLVLPGYKYLGPGNGLDKGEPVNAADAAALEHDKAYDQQLKAGDNPYLKYNHADAEFQERLKEDTSFGGNLGRAVFQAKKRLLEPLGLVEEAAKTAPGKKRPVEQSPQEPDSSAGIGKSGAQPAKKRLNFGQTGDTESVPDPQPIGEPPAAPSGVGSLTMASGGGAPVADNNEGADGVGSSSGNWHCDSQWLGDRVITTSTRTWALPTYNNHLYKQISNSTSGGSSNDNAYFGYSTPWGYFDFNRFHCHFSPRDWQRLINNNWGFRPKRLNFKLFNIQVKEVTDNNGVKTIANNLTSTVQVFTDSDYQLPYVLGSAHEGCLPPFPADVFMIPQYGYLTLNDGSQAVGRSSFYCLEYFPSQMLRTGNNFQFSYEFENVPFHSSYAHSQSLDRLMNPLIDQYLYYLSRTINGSGQNQQTLKFSVAGPSNMAVQGRNYIPGPSYRQQRVSTTVTQNNNSEFAWPGASSWALNGRNSLMNPGPAMASHKEGEDRFFPLSGSLIFGKQGTGRDNVDADKVMITNEEEIKTTNPVATESYGQVATNHQSAQTGRVDSRAQAQTGWVQNQGILPGMVWQDRDVYLQGPIWAKIPHTDGNFHPSPLMGGFGMKHPPPQILIKNTPVPADPPTAFNKDKLNSFITQYSTGQVSVEIEWELQKENSKRWNPEIQYTSNYYKSNNVEFAVNTEGVYSEPRPIGTRYLTRNL

SEQ ID NO: 199460 - protein, 743 aa, synthetic construct
MAADGYLPDWLEDNLSEGIREWWALKPGAPQPKANQQHQDNARGLVLPGYKYLGPGNGLDKGEPVNAADAAALEHDKAYDQQLKAGDNPYLKYNHADAEFQERLKEDTSFGGNLGRAVFQAKKRLLEPLGLVEEAAKTAPGKKRPVEQSPQEPDSSAGIGKSGAQPAKKRLNFGQTGDTESVPDPQPIGEPPAAPSGVGSLTMASGGGAPVADNNEGADGVGSSSGNWHCDSQWLGDRVITTSTRTWALPTYNNHLYKQISNSTSGGSSNDNAYFGYSTPWGYFDFNRFHCHFSPRDWQRLINNNWGFRPKRLNFKLFNIQVKEVTDNNGVKTIANNLTSTVQVFTDSDYQLPYVLGSAHEGCLPPFPADVFMIPQYGYLTLNDGSQAVGRSSFYCLEYFPSQMLRTGNNFQFSYEFENVPFHSSYAHSQSLDRLMNPLIDQYLYYLSRTINGSGQNQQTLKFSVAGPSNMAVQGRNYIPGPSYRQQRVSTTVTQNNNSEFAWPGASSWALNGRNSLMNPGPAMASHKEGEDRFFPLSGSLIFGKQGTGRDNVDADKVMITNEEEIKTTNPVATESYGQVATNHQSAQNMTRARDAQAQTGWVQNQGILPGMVWQDRDVYLQGPIWAKIPHTDGNFHPSPLMGGFGMKHPPPQILIKNTPVPADPPTAFNKDKLNSFITQYSTGQVSVEIEWELQKENSKRWNPEIQYTSNYYKSNNVEFAVNTEGVYSEPRPIGTRYLTRNL

SEQ ID NO: 199461 - protein, 743 aa, synthetic construct
MAADGYLPDWLEDNLSEGIREWWALKPGAPQPKANQQHQDNARGLVLPGYKYLGPGNGLDKGEPVNAADAAALEHDKAYDQQLKAGDNPYLKYNHADAEFQERLKEDTSFGGNLGRAVFQAKKRLLEPLGLVEEAAKTAPGKKRPVEQSPQEPDSSAGIGKSGAQPAKKRLNFGQTGDTESVPDPQPIGEPPAAPSGVGSLTMASGGGAPVADNNEGADGVGSSSGNWHCDSQWLGDRVITTSTRTWALPTYNNHLYKQISNSTSGGSSNDNAYFGYSTPWGYFDFNRFHCHFSPRDWQRLINNNWGFRPKRLNFKLFNIQVKEVTDNNGVKTIANNLTSTVQVFTDSDYQLPYVLGSAHEGCLPPFPADVFMIPQYGYLTLNDGSQAVGRSSFYCLEYFPSQMLRTGNNFQFSYEFENVPFHSSYAHSQSLDRLMNPLIDQYLYYLSRTINGSGQNQQTLKFSVAGPSNMAVQGRNYIPGPSYRQQRVSTTVTQNNNSEFAWPGASSWALNGRNSLMNPGPAMASHKEGEDRFFPLSGSLIFGKQGTGRDNVDADKVMITNEEEIKTTNPVATESYGQVATNHQSAQGEKPKFTAQAQTGWVQNQGILPGMVWQDRDVYLQGPIWAKIPHTDGNFHPSPLMGGFGMKHPPPQILIKNTPVPADPPTAFNKDKLNSFITQYSTGQVSVEIEWELQKENSKRWNPEIQYTSNYYKSNNVEFAVNTEGVYSEPRPIGTRYLTRNL

SEQ ID NO: 199462 - protein, 743 aa, synthetic construct
MAADGYLPDWLEDNLSEGIREWWALKPGAPQPKANQQHQDNARGLVLPGYKYLGPGNGLDKGEPVNAADAAALEHDKAYDQQLKAGDNPYLKYNHADAEFQERLKEDTSFGGNLGRAVFQAKKRLLEPLGLVEEAAKTAPGKKRPVEQSPQEPDSSAGIGKSGAQPAKKRLNFGQTGDTESVPDPQPIGEPPAAPSGVGSLTMASGGGAPVADNNEGADGVGSSSGNWHCDSQWLGDRVITTSTRTWALPTYNNHLYKQISNSTSGGSSNDNAYFGYSTPWGYFDFNRFHCHFSPRDWQRLINNNWGFRPKRLNFKLFNIQVKEVTDNNGVKTIANNLTSTVQVFTDSDYQLPYVLGSAHEGCLPPFPADVFMIPQYGYLTLNDGSQAVGRSSFYCLEYFPSQMLRTGNNFQFSYEFENVPFHSSYAHSQSLDRLMNPLIDQYLYYLSRTINGSGQNQQTLKFSVAGPSNMAVQGRNYIPGPSYRQQRVSTTVTQNNNSEFAWPGASSWALNGRNSLMNPGPAMASHKEGEDRFFPLSGSLIFGKQGTGRDNVDADKVMITNEEEIKTTNPVATESYGQVATNHQSAQMEPRQRTAQAQTGWVQNQGILPGMVWQDRDVYLQGPIWAKIPHTDGNFHPSPLMGGFGMKHPPPQILIKNTPVPADPPTAFNKDKLNSFITQYSTGQVSVEIEWELQKENSKRWNPEIQYTSNYYKSNNVEFAVNTEGVYSEPRPIGTRYLTRNL

SEQ ID NO: 199463 - DNA, 2232 bp, synthetic construct
  source 1..2232: mol_type = other DNA
atggctgccgatggttatcttccagattggctcgaggacaaccttagtgaaggaattcgcgagtggtgggctttgaaacctggagcccctcaacccaaggcaaatcaacaacatcaagacaacgctcgaggtcttgtgcttccgggttacaaataccttggacccggcaacggactcgacaagggggagccggtcaacgcagcagacgcggcggccctcgagcacgacaaggcctacgaccagcagctcaaggccggagacaacccgtacctcaagtacaaccacgccgacgccgagttccaggagcggctcaaagaagatacgtcttttgggggcaacctcgggcgagcagtcttccaggccaaaaagaggcttcttgaacctcttggtctggttgaggaagcggctaagacggctcctggaaagaagaggcctgtagagcagtctcctcaggaaccggactcctccgcgggtattggcaaatcgggtgcacagcccgctaaaaagagactcaatttcggtcagactggcgacacagagtcagtcccagaccctcaaccaatcggagaacctcccgcagccccctcaggtgtgggatctcttacaatggcttcaggtggtggcgcaccagtggcagacaataacgaaggtgccgatggagtgggtagttcctcgggaaattggcattgcgattcccaatggctgggggacagagtcatcaccaccagcacccgaacctgggccctgcccacctacaacaatcacctctacaagcaaatctccaacagcacatctggaggatcttcaaatgacaacgcctacttcggctacagcaccccctgggggtattttgacttcaacagattccactgccacttctcaccacgtgactggcagcgactcatcaacaacaactggggattccggcctaagcgactcaacttcaagctcttcaacattcaggtcaaagaggttacggacaacaatggagtcaagaccatcgccaataaccttaccagcacggtccaggtcttcacggactcagactatcagctcccgtacgtgctcgggtcggctcacgagggctgcctcccgccgttcccagcggacgttttcatgattcctcagtacgggtatctgacgcttaatgatggaagccaggccgtgggtcgttcgtccttttactgcctggaatatttcccgtcgcaaatgctaagaacgggtaacaacttccagttcagctacgagtttgagaacgtacctttccatagcagctacgctcacagccaaagcctggaccgactaatgaatccactcatcgaccaatacttgtactatctctctagaactattaacggttctggacagaatcaacaaacgctaaaattcagtgtggccggacccagcaacatggctgtccagggaagaaactacatacctggacccagctaccgacaacaacgtgtctcaaccactgtgactcaaaacaacaacagcgaatttgcttggcctggagcttcttcttgggctctcaatggacgtaatagcttgatgaatcctggacctgctatggccagccacaaagaaggagaggaccgtttctttcctttgtctggatctttaatttttggcaaacaaggtaccggcagagacaacgtggatgcggacaaagtcatgataaccaacgaagaagaaattaaaactactaacccggtagcaacggagtcctatggacaagtggccacaaaccaccagagtgcacaacgcccgaatcgcgatacttccgcgcaggctcaaaccggttgggttcaaaaccaaggaatacttccgggtatggtttggcaggacagagatgtgtacctgcaaggacccatttgggccaaaattcctcacacggacggcaactttcacccttctccgctgatgggagggtttggaatgaagcacccgcctcctcagatcctcatcaaaaacacacctgtacctgcggatcctccaacggccttcaacaaggacaagctgaactctttcatcacccagtattctactggccaagtcagcgtggagatcgagtgggagctgcagaaggaaaacagcaagcgctggaacccggagatccagtacacttccaactattacaagtctaataatgttgaatttgctgttaatactgaaggtgtatatagtgaaccccgccccattggcaccagatacctgactcgtaatctgtaa

SEQ ID NO: 199464 - DNA, 2232 bp, synthetic construct; identical to SEQ ID NO: 199463
  source 1..2232: mol_type = other DNA

SEQ ID NO: 199465 - DNA, 2232 bp, synthetic construct
  source 1..2232: mol_type = other DNA
atggctgccgatggttatcttccagattggctcgaggacaaccttagtgaaggaattcgcgagtggtgggctttgaaacctggagcccctcaacccaaggcaaatcaacaacatcaagacaacgctcgaggtcttgtgcttccgggttacaaataccttggacccggcaacggactcgacaagggggagccggtcaacgcagcagacgcggcggccctcgagcacgacaaggcctacgaccagcagctcaaggccggagacaacccgtacctcaagtacaaccacgccgacgccgagttccaggagcggctcaaagaagatacgtcttttgggggcaacctcgggcgagcagtcttccaggccaaaaagaggcttcttgaacctcttggtctggttgaggaagcggctaagacggctcctggaaagaagaggcctgtagagcagtctcctcaggaaccggactcctccgcgggtattggcaaatcgggtgcacagcccgctaaaaagagactcaatttcggtcagactggcgacacagagtcagtcccagaccctcaaccaatcggagaacctcccgcagccccctcaggtgtgggatctcttacaatggcttcaggtggtggcgcaccagtggcagacaataacgaaggtgccgatggagtgggtagttcctcgggaaattggcattgcgattcccaatggctgggggacagagtcatcaccaccagcacccgaacctgggccctgcccacctacaacaatcacctctacaagcaaatctccaacagcacatctggaggatcttcaaatgacaacgcctacttcggctacagcaccccctgggggtattttgacttcaacagattccactgccacttctcaccacgtgactggcagcgactcatcaacaacaactggggattccggcctaagcgactcaacttcaagctcttcaacattcaggtcaaagaggttacggacaacaatggagtcaagaccatcgccaataaccttaccagcacggtccaggtcttcacggactcagactatcagctcccgtacgtgctcgggtcggctcacgagggctgcctcccgccgttcccagcggacgttttcatgattcctcagtacgggtatctgacgcttaatgatggaagccaggccgtgggtcgttcgtccttttactgcctggaatatttcccgtcgcaaatgctaagaacgggtaacaacttccagttcagctacgagtttgagaacgtacctttccatagcagctacgctcacagccaaagcctggaccgactaatgaatccactcatcgaccaatacttgtactatctctctagaactattaacggttctggacagaatcaacaaacgctaaaattcagtgtggccggacccagcaacatggctgtccagggaagaaactacatacctggacccagctaccgacaacaacgtgtctcaaccactgtgactcaaaacaacaacagcgaatttgcttggcctggagcttcttcttgggctctcaatggacgtaatagcttgatgaatcctggacctgctatggccagccacaaagaaggagaggaccgtttctttcctttgtctggatctttaatttttggcaaacaaggtaccggcagagacaacgtggatgcggacaaagtcatgataaccaacgaagaagaaattaaaactactaacccggtagcaacggagtcctatggacaagtggccacaaaccaccagagtgcacaagaaaccaaccgcgcgggacgtgcgcaggctcaaaccggttgggttcaaaaccaaggaatacttccgggtatggtttggcaggacagagatgtgtacctgcaaggacccatttgggccaaaattcctcacacggacggcaactttcacccttctccgctgatgggagggtttggaatgaagcacccgcctcctcagatcctcatcaaaaacacacctgtacctgcggatcctccaacggccttcaacaaggacaagctgaactctttcatcacccagtattctactggccaagtcagcgtggagatcgagtgggagctgcagaaggaaaacagcaagcgctggaacccggagatccagtacacttccaactattacaagtctaataatgttgaatttgctgttaatactgaaggtgtatatagtgaaccccgccccattggcaccagatacctgactcgtaatctgtaa

SEQ ID NO: 199466 - DNA, 2232 bp, synthetic construct
  source 1..2232: mol_type = other DNA
atggctgccgatggttatcttccagattggctcgaggacaaccttagtgaaggaattcgcgagtggtgggctttgaaacctggagcccctcaacccaaggcaaatcaacaacatcaagacaacgctcgaggtcttgtgcttccgggttacaaataccttggacccggcaacggactcgacaagggggagccggtcaacgcagcagacgcggcggccctcgagcacgacaaggcctacgaccagcagctcaaggccggagacaacccgtacctcaagtacaaccacgccgacgccgagttccaggagcggctcaaagaagatacgtcttttgggggcaacctcgggcgagcagtcttccaggccaaaaagaggcttcttgaacctcttggtctggttgaggaagcggctaagacggctcctggaaagaagaggcctgtagagcagtctcctcaggaaccggactcctccgcgggtattggcaaatcgggtgcacagcccgctaaaaagagactcaatttcggtcagactggcgacacagagtcagtcccagaccctcaaccaatcggagaacctcccgcagccccctcaggtgtgggatctcttacaatggcttcaggtggtggcgcaccagtggcagacaataacgaaggtgccgatggagtgggtagttcctcgggaaattggcattgcgattcccaatggctgggggacagagtcatcaccaccagcacccgaacctgggccctgcccacctacaacaatcacctctacaagcaaatctccaacagcacatctggaggatcttcaaatgacaacgcctacttcggctacagcaccccctgggggtattttgacttcaacagattccactgccacttctcaccacgtgactggcagcgactcatcaacaacaactggggattccggcctaagcgactcaacttcaagctcttcaacattcaggtcaaagaggttacggacaacaatggagtcaagaccatcgccaataaccttaccagcacggtccaggtcttcacggactcagactatcagctcccgtacgtgctcgggtcggctcacgagggctgcctcccgccgttcccagcggacgttttcatgattcctcagtacgggtatctgacgcttaatgatggaagccaggccgtgggtcgttcgtccttttactgcctggaatatttcccgtcgcaaatgctaagaacgggtaacaacttccagttcagctacgagtttgagaacgtacctttccatagcagctacgctcacagccaaagcctggaccgactaatgaatccactcatcgaccaatacttgtactatctctctagaactattaacggttctggacagaatcaacaaacgctaaaattcagtgtggccggacccagcaacatggctgtccagggaagaaactacatacctggacccagctaccgacaacaacgtgtctcaaccactgtgactcaaaacaacaacagcgaatttgcttggcctggagcttcttcttgggctctcaatggacgtaatagcttgatgaatcctggacctgctatggccagccacaaagaaggagaggaccgtttctttcctttgtctggatctttaatttttggcaaacaaggtaccggcagagacaacgtggatgcggacaaagtcatgataaccaacgaagaagaaattaaaactactaacccggtagcaacggagtcctatggacaagtggccacaaaccaccagagtgcacaaactggacgagtcgattcgcgtgcgcaggctcaaaccggttgggttcaaaaccaaggaatacttccgggtatggtttggcaggacagagatgtgtacctgcaaggacccatttgggccaaaattcctcacacggacggcaactttcacccttctccgctgatgggagggtttggaatgaagcacccgcctcctcagatcctcatcaaaaacacacctgtacctgcggatcctccaacggccttcaacaaggacaagctgaactctttcatcacccagtattctactggccaagtcagcgtggagatcgagtgggagctgcagaaggaaaacagcaagcgctggaacccggagatccagtacacttccaactattacaagtctaataatgttgaatttgctgttaatactgaaggtgtatatagtgaaccccgccccattggcaccagatacctgactcgtaatctgtaa

SEQ ID NO: 199467 - DNA, 2232 bp, synthetic construct
  source 1..2232: mol_type = other DNA
atggctgccgatggttatcttccagattggctcgaggacaaccttagtgaaggaattcgcgagtggtgggctttgaaacctggagcccctcaacccaaggcaaatcaacaacatcaagacaacgctcgaggtcttgtgcttccgggttacaaataccttggacccggcaacggactcgacaagggggagccggtcaacgcagcagacgcggcggccctcgagcacgacaaggcctacgaccagcagctcaaggccggagacaacccgtacctcaagtacaaccacgccgacgccgagttccaggagcggctcaaagaagatacgtcttttgggggcaacctcgggcgagcagtcttccaggccaaaaagaggcttcttgaacctcttggtctggttgaggaagcggctaagacggctcctggaaagaagaggcctgtagagcagtctcctcaggaaccggactcctccgcgggtattggcaaatcgggtgcacagcccgctaaaaagagactcaatttcggtcagactggcgacacagagtcagtcccagaccctcaaccaatcggagaacctcccgcagccccctcaggtgtgggatctcttacaatggcttcaggtggtggcgcaccagtggcagacaataacgaaggtgccgatggagtgggtagttcctcgggaaattggcattgcgattcccaatggctgggggacagagtcatcaccaccagcacccgaacctgggccctgcccacctacaacaatcacctctacaagcaaatctccaacagcacatctggaggatcttcaaatgacaacgcctacttcggctacagcaccccctgggggtattttgacttcaacagattccactgccacttctcaccacgtgactggcagcgactcatcaacaacaactggggattccggcctaagcgactcaacttcaagctcttcaacattcaggtcaaagaggttacggacaacaatggagtcaagaccatcgccaataaccttaccagcacggtccaggtcttcacggactcagactatcagctcccgtacgtgctcgggtcggctcacgagggctgcctcccgccgttcccagcggacgttttcatgattcctcagtacgggtatctgacgcttaatgatggaagccaggccgtgggtcgttcgtccttttactgcctggaatatttcccgtcgcaaatgctaagaacgggtaacaacttccagttcagctacgagtttgagaacgtacctttccatagcagctacgctcacagccaaagcctggaccgactaatgaatccactcatcgaccaatacttgtactatctctctagaactattaacggttctggacagaatcaacaaacgctaaaattcagtgtggccggacccagcaacatggctgtccagggaagaaactacatacctggacccagctaccgacaacaacgtgtctcaaccactgtgactcaaaacaacaacagcgaatttgcttggcctggagcttcttcttgggctctcaatggacgtaatagcttgatgaatcctggacctgctatggccagccacaaagaaggagaggaccgtttctttcctttgtctggatctttaatttttggcaaacaaggtaccggcagagacaacgtggatgcggacaaagtcatgataaccaacgaagaagaaattaaaactactaacccggtagcaacggagtcctatggacaagtggccacaaaccaccagagtgcacaaaatatgaccagggcaagggacgcgcaggctcaaaccggttgggttcaaaaccaaggaatacttccgggtatggtttggcaggacagagatgtgtacctgcaaggacccatttgggccaaaattcctcacacggacggcaactttcacccttctccgctgatgggagggtttggaatgaagcacccgcctcctcagatcctcatcaaaaacacacctgtacctgcggatcctccaacggccttcaacaaggacaagctgaactctttcatcacccagtattctactggccaagtcagcgtggagatcgagtgggagctgcagaaggaaaacagcaagcgctggaacccggagatccagtacacttccaactattacaagtctaataatgttgaatttgctgttaatactgaaggtgtatatagtgaaccccgccccattggcaccagatacctgactcgtaatctgtaa

SEQ ID NO: 199468 - DNA, 2232 bp, synthetic construct
  source 1..2232: mol_type = other DNA
atggctgccgatggttatcttccagattggctcgaggacaaccttagtgaaggaattcgcgagtggtgggctttgaaacctggagcccctcaacccaaggcaaatcaacaacatcaagacaacgctcgaggtcttgtgcttccgggttacaaataccttggacccggcaacggactcgacaagggggagccggtcaacgcagcagacgcggcggccctcgagcacgacaaggcctacgaccagcagctcaaggccggagacaacccgtacctcaagtacaaccacgccgacgccgagttccaggagcggctcaaagaagatacgtcttttgggggcaacctcgggcgagcagtcttccaggccaaaaagaggcttcttgaacctcttggtctggttgaggaagcggctaagacggctcctggaaagaagaggcctgtagagcagtctcctcaggaaccggactcctccgcgggtattggcaaatcgggtgcacagcccgctaaaaagagactcaatttcggtcagactggcgacacagagtcagtcccagaccctcaaccaatcggagaacctcccgcagccccctcaggtgtgggatctcttacaatggcttcaggtggtggcgcaccagtggcagacaataacgaaggtgccgatggagtgggtagttcctcgggaaattggcattgcgattcccaatggctgggggacagagtcatcaccaccagcacccgaacctgggccctgcccacctacaacaatcacctctacaagcaaatctccaacagcacatctggaggatcttcaaatgacaacgcctacttcggctacagcaccccctgggggtattttgacttcaacagattccactgccacttctcaccacgtgactggcagcgactcatcaacaacaactggggattccggcctaagcgactcaacttcaagctcttcaacattcaggtcaaagaggttacggacaacaatggagtcaagaccatcgccaataaccttaccagcacggtccaggtcttcacggactcagactatcagctcccgtacgtgctcgggtcggctcacgagggctgcctcccgccgttcccagcggacgttttcatgattcctcagtacgggtatctgacgcttaatgatggaagccaggccgtgggtcgttcgtccttttactgcctggaatatttcccgtcgcaaatgctaagaacgggtaacaacttccagttcagctacgagtttgagaacgtacctttccatagcagctacgctcacagccaaagcctggaccgactaatgaatccactcatcgaccaatacttgtactatctctctagaactattaacggttctggacagaatcaacaaacgctaaaattcagtgtggccggacccagcaacatggctgtccagggaagaaactacatacctggacccagctaccgacaacaacgtgtctcaaccactgtgactcaaaacaacaacagcgaatttgcttggcctggagcttcttcttgggctctcaatggacgtaatagcttgatgaatcctggacctgctatggccagccacaaagaaggagaggaccgtttctttcctttgtctggatctttaatttttggcaaacaaggtaccggcagagacaacgtggatgcggacaaagtcatgataaccaacgaagaagaaattaaaactactaacccggtagcaacggagtcctatggacaagtggccacaaaccaccagagtgcacaaggtgaaaagccgaagtttactgcgcaggctcaaaccggttgggttcaaaaccaaggaatacttccgggtatggtttggcaggacagagatgtgtacctgcaaggacccatttgggccaaaattcctcacacggacggcaactttcacccttctccgctgatgggagggtttggaatgaagcacccgcctcctcagatcctcatcaaaaacacacctgtacctgcggatcctccaacggccttcaacaaggacaagctgaactctttcatcacccagtattctactggccaagtcagcgtggagatcgagtgggagctgcagaaggaaaacagcaagcgctggaacccggagatccagtacacttccaactattacaagtctaataatgttgaatttgctgttaatactgaaggtgtatatagtgaaccccgccccattggcaccagatacctgactcgtaatctgtaa

SEQ ID NO: 199469 - DNA, 2232 bp, synthetic construct
  source 1..2232: mol_type = other DNA
atggctgccgatggttatcttccagattggctcgaggacaaccttagtgaaggaattcgcgagtggtgggctttgaaacctggagcccctcaacccaaggcaaatcaacaacatcaagacaacgctcgaggtcttgtgcttccgggttacaaataccttggacccggcaacggactcgacaagggggagccggtcaacgcagcagacgcggcggccctcgagcacgacaaggcctacgaccagcagctcaaggccggagacaacccgtacctcaagtacaaccacgccgacgccgagttccaggagcggctcaaagaagatacgtcttttgggggcaacctcgggcgagcagtcttccaggccaaaaagaggcttcttgaacctcttggtctggttgaggaagcggctaagacggctcctggaaagaagaggcctgtagagcagtctcctcaggaaccggactcctccgcgggtattggcaaatcgggtgcacagcccgctaaaaagagactcaatttcggtcagactggcgacacagagtcagtcccagaccctcaaccaatcggagaacctcccgcagccccctcaggtgtgggatctcttacaatggcttcaggtggtggcgcaccagtggcagacaataacgaaggtgccgatggagtgggtagttcctcgggaaattggcattgcgattcccaatggctgggggacagagtcatcaccaccagcacccgaacctgggccctgcccacctacaacaatcacctctacaagcaaatctccaacagcacatctggaggatcttcaaatgacaacgcctacttcggctacagcaccccctgggggtattttgacttcaacagattccactgccacttctcaccacgtgactggcagcgactcatcaacaacaactggggattccggcctaagcgactcaacttcaagctcttcaacattcaggtcaaagaggttacggacaacaatggagtcaagaccatcgccaataaccttaccagcacggtccaggtcttcacggactcagactatcagctcccgtacgtgctcgggtcggctcacgagggctgcctcccgccgttcccagcggacgttttcatgattcctcagtacgggtatctgacgcttaatgatggaagccaggccgtgggtcgttcgtccttttactgcctggaatatttcccgtcgcaaatgctaagaacgggtaacaacttccagttcagctacgagtttgagaacgtacctttccatagcagctacgctcacagccaaagcctggaccgactaatgaatccactcatcgaccaatacttgtactatctctctagaactattaacggttctggacagaatcaacaaacgctaaaattcagtgtggccggacccagcaacatggctgtccagggaagaaactacatacctggacccagctaccgacaacaacgtgtctcaaccactgtgactcaaaacaacaacagcgaatttgcttggcctggagcttcttcttgggctctcaatggacgtaatagcttgatgaatcctggacctgctatggccagccacaaagaaggagaggaccgtttctttcctttgtctggatctttaatttttggcaaacaaggtaccggcagagacaacgtggatgcggacaaagtcatgataaccaacgaagaagaaattaaaactactaacccggtagcaacggagtcctatggacaagtggccacaaaccaccagagtgcacaaatggagccgcgacagaggactgcgcaggctcaaaccggttgggttcaaaaccaaggaatacttccgggtatggtttggcaggacagagatgtgtacctgcaaggacccatttgggccaaaattcctcacacggacggcaactttcacccttctccgctgatgggagggtttggaatgaagcacccgcctcctcagatcctcatcaaaaacacacctgtacctgcggatcctccaacggccttcaacaaggacaagctgaactctttcatcacccagtattctactggccaagtcagcgtggagatcgagtgggagctgcagaaggaaaacagcaagcgctggaacccggagatccagtacacttccaactattacaagtctaataatgttgaatttgctgttaatactgaaggtgtatatagtgaaccccgccccattggcaccagatacctgactcgtaatctgtaa

SEQ ID NO: 199470 - DNA, 88 bp, synthetic construct
  source 1..88: mol_type = other DNA
  misc_difference 41: note = a, c, g, t, unknown or other
  misc_difference 42: note = a, c, g, t, unknown or other
  misc_difference 43: note = a, c, g, t, unknown or other
  misc_difference 44: note = a, c, g, t, unknown or other
  misc_difference 45: note = a, c, g, t, unknown or other
  misc_difference 46: note = a, c, g, t, unknown or other
  misc_difference 47: note = a, c, g, t, unknown or other
  misc_difference 48: note = a, c, g, t, unknown or other
  misc_difference 49: note = a, c, g, t, unknown or other
  misc_difference 50: note = a, c, g, t, unknown or other
  misc_difference 51: note = a, c, g, t, unknown or other
  misc_difference 52: note = a, c, g, t, unknown or other
  misc_difference 53: note = a, c, g, t, unknown or other
  misc_difference 54: note = a, c, g, t, unknown or other
  misc_difference 55: note = a, c, g, t, unknown or other
  misc_difference 56: note = a, c, g, t, unknown or other
  misc_difference 57: note = a, c, g, t, unknown or other
  misc_difference 58: note = a, c, g, t, unknown or other
  misc_difference 59: note = a, c, g, t, unknown or other
  misc_difference 60: note = a, c, g, t, unknown or other
  misc_difference 61: note = a, c, g, t, unknown or other
gtattccttggttttgaacccaaccggtctgcgcctgtgcnnnnnnnnnnnnnnnnnnnnnttgggcactctggtggtttgtggccac

SEQ ID NO: 199471 - DNA, 22 bp, synthetic construct
  source 1..22: mol_type = other DNA
cggactcagactatcagctccc

SEQ ID NO: 199472 - DNA, 83 bp, synthetic construct
  source 1..83: mol_type = other DNA
  misc_difference 42: note = a, c, g or t
  misc_difference 43: note = a, c, g or t
  misc_difference 45: note = a, c, g or t
  misc_difference 46: note = a, c, g or t
  misc_difference 48: note = a, c, g or t
  misc_difference 49: note = a, c, g or t
  misc_difference 51: note = a, c, g or t
  misc_difference 52: note = a, c, g or t
  misc_difference 54: note = a, c, g or t
  misc_difference 55: note = a, c, g or t
  misc_difference 57: note = a, c, g or t
  misc_difference 58: note = a, c, g or t
  misc_difference 60: note = a, c, g or t
  misc_difference 61: note = a, c, g or t
gtattccttggttttgaacccaaccggtctgcgcctgtgcnnnnnnnnnnnnnnnnnnnnnttgggcactctggtggtttgtg

SEQ ID NO: 199473 - DNA, 26 bp, synthetic construct
  source 1..26: mol_type = other DNA
gtattccttggttttgaacccaaccg

SEQ ID NO: 199474 - DNA, 21 bp, synthetic construct
  source 1..21: mol_type = other DNA
ggaacccctagtgatggagtt

SEQ ID NO: 199475 - DNA, 16 bp, synthetic construct
  source 1..16: mol_type = other DNA
cggcctcagtgagcga

SEQ ID NO: 199476 - DNA, 21 bp, synthetic construct
  source 1..21: mol_type = other DNA
cactccctctctgcgcgctcg

SEQ ID NO: 199477 - DNA, 23 bp, synthetic construct
  source 1..23: mol_type = other DNA
tgttcccatagtaacgccaatag

SEQ ID NO: 199478 - DNA, 26 bp, synthetic construct
  source 1..26: mol_type = other DNA
gtacttggcatatgatacacttgatg

SEQ ID NO: 199479 - DNA, 24 bp, synthetic construct
  source 1..24: mol_type = other DNA
ttacggtaaactgcccacttggca

SEQ ID NO: 199480 - DNA, 68 bp, synthetic construct
  source 1..68: mol_type = other DNA
  misc_difference 29: note = a, c, g, t, unknown or other
  misc_difference 30: note = a, c, g, t, unknown or other
  misc_difference 31: note = a, c, g, t, unknown or other
  misc_difference 32: note = a, c, g, t, unknown or other
  misc_difference 33: note = a, c, g, t, unknown or other
  misc_difference 34: note = a, c, g, t, unknown or other
  misc_difference 35: note = a, c, g, t, unknown or other
  misc_difference 36: note = a, c, g, t, unknown or other
ctttccctacacgacgctcttccgatctnnnnnnnnccaacgaagaagaaattaaaactactaacccg

SEQ ID NO: 199481 - DNA, 67 bp, synthetic construct
  source 1..67: mol_type = other DNA
  misc_difference 29: note = a, c, g, t, unknown or other
  misc_difference 30: note = a, c, g, t, unknown or other
  misc_difference 31: note = a, c, g, t, unknown or other
  misc_difference 32: note = a, c, g, t, unknown or other
  misc_difference 33: note = a, c, g, t, unknown or other
  misc_difference 34: note = a, c, g, t, unknown or other
  misc_difference 35: note = a, c, g, t, unknown or other
ctttccctacacgacgctcttccgatctnnnnnnnccaacgaagaagaaattaaaactactaacccg

SEQ ID NO: 199482 - DNA, 66 bp, synthetic construct
  source 1..66: mol_type = other DNA
  misc_difference 29: note = a, c, g, t, unknown or other
  misc_difference 30: note = a, c, g, t, unknown or other
  misc_difference 31: note = a, c, g, t, unknown or other
  misc_difference 32: note = a, c, g, t, unknown or other
  misc_difference 33: note = a, c, g, t, unknown or other
  misc_difference 34: note = a, c, g, t, unknown or other
ctttccctacacgacgctcttccgatctnnnnnnccaacgaagaagaaattaaaactactaacccg

SEQ ID NO: 199483 - DNA, 65 bp, synthetic construct
  source 1..65: mol_type = other DNA
  misc_difference 29: note = a, c, g, t, unknown or other
  misc_difference 30: note = a, c, g, t, unknown or other
  misc_difference 31: note = a, c, g, t, unknown or other
  misc_difference 32: note = a, c, g, t, unknown or other
  misc_difference 33: note = a, c, g, t, unknown or other
ctttccctacacgacgctcttccgatctnnnnnccaacgaagaagaaattaaaactactaacccg

SEQ ID NO: 199484 - DNA, 64 bp, synthetic construct
  source 1..64: mol_type = other DNA
  misc_difference 29: note = a, c, g, t, unknown or other
  misc_difference 30: note = a, c, g, t, unknown or other
  misc_difference 31: note = a, c, g, t, unknown or other
  misc_difference 32: note = a, c, g, t, unknown or other
ctttccctacacgacgctcttccgatctnnnnccaacgaagaagaaattaaaactactaacccg

SEQ ID NO: 199485 - DNA, 63 bp, synthetic construct
  source 1..63: mol_type = other DNA
  misc_difference 29: note = a, c, g, t, unknown or other
  misc_difference 30: note = a, c, g, t, unknown or other
  misc_difference 31: note = a, c, g, t, unknown or other
ctttccctacacgacgctcttccgatctnnnccaacgaagaagaaattaaaactactaacccg

SEQ ID NO: 199486 - DNA, 62 bp, synthetic construct
  source 1..62: mol_type = other DNA
  misc_difference 29: note = a, c, g, t, unknown or other
  misc_difference 30: note = a, c, g, t, unknown or other
ctttccctacacgacgctcttccgatctnnccaacgaagaagaaattaaaactactaacccg

SEQ ID NO: 199487 - DNA, 61 bp, synthetic construct
  source 1..61: mol_type = other DNA
  misc_difference 29: note = a, c, g, t, unknown or other
ctttccctacacgacgctcttccgatctnccaacgaagaagaaattaaaactactaacccg

SEQ ID NO: 199488 - DNA, 53 bp, synthetic construct
  source 1..53: mol_type = other DNA
ggagttcagacgtgtgctcttccgatctcatctctgtcctgccaaaccatacc

SEQ ID NO: 199489 - DNA, 54 bp, synthetic construct
  source 1..54: mol_type = other DNA
  misc_difference 29: note = a, c, g, t, unknown or other
ggagttcagacgtgtgctcttccgatctncatctctgtcctgccaaaccatacc

SEQ ID NO: 199490 - DNA, 55 bp, synthetic construct
  source 1..55: mol_type = other DNA
  misc_difference 29: note = a, c, g, t, unknown or other
  misc_difference 30: note = a, c, g, t, unknown or other
ggagttcagacgtgtgctcttccgatctnncatctctgtcctgccaaaccatacc

SEQ ID NO: 199491 - DNA, 56 bp, synthetic construct
  source 1..56: mol_type = other DNA
  misc_difference 29: note = a, c, g, t, unknown or other
  misc_difference 30: note = a, c, g, t, unknown or other
  misc_difference 31: note = a, c, g, t, unknown or other
ggagttcagacgtgtgctcttccgatctnnncatctctgtcctgccaaaccatacc

SEQ ID NO: 199492 - DNA, 57 bp, synthetic construct
  source 1..57: mol_type = other DNA
  misc_difference 29: note = a, c, g, t, unknown or other
  misc_difference 30: note = a, c, g, t, unknown or other
  misc_difference 31: note = a, c, g, t, unknown or other
  misc_difference 32: note = a, c, g, t, unknown or other
ggagttcagacgtgtgctcttccgatctnnnncatctctgtcctgccaaaccatacc

SEQ ID NO: 199493 - DNA, 58 bp, synthetic construct
  source 1..58: mol_type = other DNA
  misc_difference 29: note = a, c, g, t, unknown or other
  misc_difference 30: note = a, c, g, t, unknown or other
  misc_difference 31: note = a, c, g, t, unknown or other
  misc_difference 32: note = a, c, g, t, unknown or other
  misc_difference 33: note = a, c, g, t, unknown or other
ggagttcagacgtgtgctcttccgatctnnnnncatctctgtcctgccaaaccatacc

SEQ ID NO: 199494 - DNA, 59 bp, synthetic construct
  source 1..59: mol_type = other DNA
  misc_difference 29: note = a, c, g, t, unknown or other
  misc_difference 30: note = a, c, g, t, unknown or other
  misc_difference 31: note = a, c, g, t, unknown or other
  misc_difference 32: note = a, c, g, t, unknown or other
  misc_difference 33: note = a, c, g, t, unknown or other
  misc_difference 34: note = a, c, g, t, unknown or other
ggagttcagacgtgtgctcttccgatctnnnnnncatctctgtcctgccaaaccatacc

SEQ ID NO: 199495 - DNA, 60 bp, synthetic construct
  source 1..60: mol_type = other DNA
  misc_difference 29: note = a, c, g, t, unknown or other
  misc_difference 30: note = a, c, g, t, unknown or other
  misc_difference 31: note = a, c, g, t, unknown or other
  misc_difference 32: note = a, c, g, t, unknown or other
  misc_difference 33: note = a, c, g, t, unknown or other
  misc_difference 34: note = a, c, g, t, unknown or other
  misc_difference 35: note = a, c, g, t, unknown or other
ggagttcagacgtgtgctcttccgatctnnnnnnncatctctgtcctgccaaaccatacc

SEQ ID NO: 199496 - DNA, 149 bp, synthetic construct
  source 1..149: mol_type = other DNA
  misc_difference 84: note = a, c, g, t, unknown or other
  misc_difference 85: note = a, c, g, t, unknown or other
  misc_difference 86: note = a, c, g, t, unknown or other
  misc_difference 87: note = a, c, g, t, unknown or other
  misc_difference 88: note = a, c, g, t, unknown or other
  misc_difference 89: note = a, c, g, t, unknown or other
  misc_difference 90: note = a, c, g, t, unknown or other
  misc_difference 91: note = a, c, g, t, unknown or other
  misc_difference 92: note = a, c, g, t, unknown or other
  misc_difference 93: note = a, c, g, t, unknown or other
  misc_difference 94: note = a, c, g, t, unknown or other
  misc_difference 95: note = a, c, g, t, unknown or other
  misc_difference 96: note = a, c, g, t, unknown or other
  misc_difference 97: note = a, c, g, t, unknown or other
  misc_difference 98: note = a, c, g, t, unknown or other
  misc_difference 99: note = a, c, g, t, unknown or other
  misc_difference 100: note = a, c, g, t, unknown or other
  misc_difference 101: note = a, c, g, t, unknown or other
  misc_difference 102: note = a, c, g, t, unknown or other
  misc_difference 103: note = a, c, g, t, unknown or other
  misc_difference 104: note = a, c, g, t, unknown or other
ccaacgaagaagaaattaaaactactaacccggtagcaacggagtcctatggacaagtggccacaaaccaccagagtgcccaannnnnnnnnnnnnnnnnnnnngcacaggcgcagaccggttgggttcaaaaccaaggaatacttccg

SEQ ID NO: 199497 - DNA, 21 bp, synthetic construct
  source 1..21: mol_type = other DNA
gcacaagctggagtacaacta

SEQ ID NO: 199498 - DNA, 19 bp, synthetic construct
  source 1..19: mol_type = other DNA
tgttgtggcggatcttgaa

SEQ ID NO: 199499 - DNA, 20 bp, synthetic construct
  source 1..20: mol_type = other DNA
accacagtccatgccatcac

SEQ ID NO: 199500 - DNA, 20 bp, synthetic construct
  source 1..20: mol_type = other DNA
tccaccaccctgttgctgta

SEQ ID NO: 199501 - protein, 7 aa, synthetic construct
  VARIANT 2: note = Any amino acid
  VARIANT 3: note = Any amino acid
RXXQGGG

SEQ ID NO: 199502 - protein, 7 aa, synthetic construct
  VARIANT 3: note = Any amino acid
  VARIANT 4: note = Any amino acid
  VARIANT 6: note = threonine or valine
QRXXSXA

SEQ ID NO: 199503 - protein, 7 aa, synthetic construct
  VARIANT 4: note = Any amino acid
  VARIANT 5: note = Any amino acid
NTRXXSA

SEQ ID NO: 199504 - protein, 7 aa, synthetic construct
  VARIANT 3: note = Any amino acid
  VARIANT 4: note = Any amino acid
RQXXTNA

SEQ ID NO: 199505 - protein, 7 aa, synthetic construct
  VARIANT 4: note = Any amino acid
  VARIANT 5: note = Any amino acid
MRGXXMG

SEQ ID NO: 199506 - protein, 7 aa, synthetic construct
  VARIANT 2: note = Any amino acid
  VARIANT 4: note = Any amino acid
RXSXSTP

SEQ ID NO: 199507 - protein, 7 aa, synthetic construct
  VARIANT 3: note = Any amino acid
  VARIANT 4: note = Any amino acid
QRXXTNG

SEQ ID NO: 199508 - protein, 7 aa, synthetic construct
  VARIANT 2: note = Any amino acid
  VARIANT 6: note = Any amino acid
QXRQTXP

SEQ ID NO: 199509 - protein, 7 aa, synthetic construct
  VARIANT 3: note = Any amino acid
  VARIANT 4: note = Any amino acid
TRXXNNA

SEQ ID NO: 199510 - protein, 7 aa, synthetic construct
  VARIANT 3: note = Any amino acid
  VARIANT 6: note = Any amino acid
GQXRVXG

SEQ ID NO: 199511 - protein, 7 aa, synthetic construct
  VARIANT 2: note = Any amino acid
  VARIANT 6: note = Any amino acid
TXTSRXG

SEQ ID NO: 199512 - protein, 7 aa, synthetic construct
  VARIANT 4: note = Any amino acid
  VARIANT 5: note = Any amino acid
TRGXXTG

SEQ ID NO: 199513 - protein, 7 aa, synthetic construct
  VARIANT 2: note = Any amino acid
  VARIANT 5: note = Any amino acid
TXRTXSA

SEQ ID NO: 199514 - protein, 7 aa, synthetic construct
  VARIANT 3: note = Any amino acid
  VARIANT 5: note = Any amino acid
MGXRXGA

SEQ ID NO: 199515 - protein, 7 aa, synthetic construct
  VARIANT 3: note = Any amino acid
  VARIANT 6: note = Any amino acid
RQXPTXA

SEQ ID NO: 199516 - protein, 7 aa, synthetic construct
  VARIANT 2: note = Any amino acid
  VARIANT 4: note = Any amino acid
TXTXRSG

SEQ ID NO: 199517 - protein, 7 aa, synthetic construct
  VARIANT 2: note = Any amino acid
  VARIANT 6: note = Any amino acid
TXRGSXP

SEQ ID NO: 199518 - protein, 7 aa, synthetic construct
  VARIANT 3: note = Any amino acid
  VARIANT 4: note = Any amino acid
TRXXTMG

SEQ ID NO: 199519 - protein, 7 aa, synthetic construct
  VARIANT 2: note = Any amino acid
  VARIANT 5: note = Any amino acid
RXTSXSP

SEQ ID NO: 199520 - protein, 7 aa, synthetic construct
  VARIANT 2: note = Any amino acid
  VARIANT 3: note = Any amino acid
NXXQRSA

SEQ ID NO: 199521 - protein, 7 aa, synthetic construct
  VARIANT 3: note = Any amino acid
  VARIANT 6: note = Any amino acid
QRXPAXG

SEQ ID NO: 199522 - protein, 7 aa, synthetic construct
  VARIANT 3: note = Any amino acid
  VARIANT 5: note = Any amino acid
RSXSXGG

SEQ ID NO: 199523 - protein, 7 aa, synthetic construct
  VARIANT 4: note = Any amino acid
  VARIANT 6: note = Any amino acid
RTSXSXP

SEQ ID NO: 199524 - protein, 7 aa, synthetic construct
  VARIANT 4: note = Any amino acid
  VARIANT 6: note = Any amino acid
TRQXTXG

SEQ ID NO: 199525 - protein, 7 aa, synthetic construct
  VARIANT 3: note = Any amino acid
  VARIANT 5: note = Any amino acid
QRXSXTG

SEQ ID NO: 199526 - protein, 7 aa, synthetic construct
  VARIANT 2: note = Any amino acid
  VARIANT 5: note = Any amino acid
RXNSXSP

SEQ ID NO: 199527 - protein, 7 aa, synthetic construct
  VARIANT 3: note = Any amino acid
  VARIANT 5: note = Any amino acid
MRXGXQS

SEQ ID NO: 199528 - protein, 7 aa, synthetic construct
  VARIANT 2: note = Any amino acid
  VARIANT 3: note = Any amino acid
NXXSRQG

SEQ ID NO: 199529 - protein, 7 aa, synthetic construct
  VARIANT 3: note = Any amino acid
  VARIANT 6: note = Any amino acid
NRXSTXA

SEQ ID NO: 199530 - protein, 7 aa, synthetic construct
  VARIANT 4: note = Any amino acid
  VARIANT 6: note = Any amino acid
RSQXGXG

SEQ ID NO: 199531 - protein, 7 aa, synthetic construct
  VARIANT 2: note = Any amino acid
  VARIANT 6: note = Any amino acid
TXRTNXA

SEQ ID NO: 199532 - protein, 7 aa, synthetic construct
  VARIANT 2: note = Any amino acid
  VARIANT 4: note = Any amino acid
TXSXRMG

SEQ ID NO: 199533 - protein, 7 aa, synthetic construct
  VARIANT 3: note = Any amino acid
  VARIANT 4: note = Any amino acid
TRXXTQA

SEQ ID NO: 199534 - protein, 7 aa, synthetic construct
  VARIANT 4: note = Any amino acid
  VARIANT 5: note = Any amino acid
TRTXXSG

SEQ ID NO: 199535 - protein, 7 aa, synthetic construct
  VARIANT 5: note = Any amino acid
  VARIANT 6: note = Any amino acid
YSGKXXG

SEQ ID NO: 199536 - protein, 7 aa, synthetic construct
  VARIANT 3: note = Any amino acid
  VARIANT 5: note = Any amino acid
RNXQXSG

SEQ ID NO: 199537 - protein, 7 aa, synthetic construct
  VARIANT 3: note = Any amino acid
  VARIANT 5: note = Any amino acid
KTXSXGA

SEQ ID NO: 199538 - protein, 7 aa, synthetic construct
  VARIANT 1: note = lysine or methionine
  VARIANT 2: note = Any amino acid
  VARIANT 4: note = Any amino acid
XXNXGNA

SEQ ID NO: 199539 - protein, 7 aa, synthetic construct
  VARIANT 1: note = threonine or valine
  VARIANT 2: note = Any amino acid
  VARIANT 3: note = Any amino acid
XXXNRQG

SEQ ID NO: 199540 - protein, 7 aa, synthetic construct
  VARIANT 3: note = Any amino acid
  VARIANT 4: note = Any amino acid
RSXXNTG

SEQ ID NO: 199541 - protein, 7 aa, synthetic construct
  VARIANT 2: note = Any amino acid
  VARIANT 6: note = Any amino acid
QXKSAXA

SEQ ID NO: 199542 - protein, 7 aa, synthetic construct
  VARIANT 3: note = Any amino acid
  VARIANT 5: note = Any amino acid
KNXGXTA

SEQ ID NO: 199543 - protein, 7 aa, synthetic construct
  VARIANT 2: note = Any amino acid
  VARIANT 4: note = Any amino acid
  VARIANT 5: note = alanine or serine
KXSXXGA

SEQ ID NO: 199544 - protein, 7 aa, synthetic construct
  VARIANT 3: note = Any amino acid
  VARIANT 5: note = Any amino acid
KTXSXSA

SEQ ID NO: 199545 - protein, 7 aa, synthetic construct
  VARIANT 3: note = Any amino acid
  VARIANT 4: note = Any amino acid
VKXXSTG

SEQ ID NO: 199546 - protein, 7 aa, synthetic construct
  VARIANT 3: note = Any amino acid
  VARIANT 6: note = Any amino acid
PRXATXG

SEQ ID NO: 199547 - protein, 7 aa, synthetic construct
  VARIANT 4: note = Any amino acid
  VARIANT 6: note = Any amino acid
TRSXTXM

SEQ ID NO: 199548 - protein, 7 aa, synthetic construct
  VARIANT 2: note = Any amino acid
  VARIANT 3: note = Any amino acid
TXXRQQA

SEQ ID NO: 199549 - protein, 7 aa, synthetic construct
  VARIANT 3: note = Any amino acid
  VARIANT 5: note = Any amino acid
KNXSXSG

SEQ ID NO: 199550 - protein, 7 aa, synthetic construct
  VARIANT 4: note = Any amino acid
  VARIANT 5: note = alanine or glycine
  VARIANT 6: note = Any amino acid
RNSXXXG

SEQ ID NO: 199551 - protein, 7 aa, synthetic construct
  VARIANT 3: note = Any amino acid
  VARIANT 6: note = Any amino acid
QRXNSXA

SEQ ID NO: 199552 - protein, 7 aa, synthetic construct
  VARIANT 2: note = Any amino acid
  VARIANT 5: note = Any amino acid
RXSNXTG

SEQ ID NO: 199553 - protein, 7 aa, synthetic construct
  VARIANT 4: note = Any amino acid
  VARIANT 5: note = Any amino acid
RAPXXNS

SEQ ID NO: 199554 - protein, 7 aa, synthetic construct
  VARIANT 2: note = Any amino acid
  VARIANT 6: note = Any amino acid
RXNNSXG

SEQ ID NO: 199555 - protein, 7 aa, synthetic construct
  VARIANT 3: note = Any amino acid
  VARIANT 6: note = Any amino acid
QKXGTXG

SEQ ID NO: 199556 - protein, 7 aa, synthetic construct
  VARIANT 2: note = Any amino acid
  VARIANT 3: note = Any amino acid
TXXNRGG

SEQ ID NO: 199557 - protein, 7 aa, synthetic construct
  VARIANT 3: note = Any amino acid
  VARIANT 6: note = Any amino acid
VKXASXA

SEQ ID NO: 199558 - protein, 7 aa, synthetic construct
  VARIANT 2: note = Any amino acid
  VARIANT 4: note = Any amino acid
KXPXTGG

SEQ ID NO: 199559 - protein, 7 aa, synthetic construct
  VARIANT 2: note = Any amino acid
  VARIANT 3: note = Any amino acid
KXXQNQG

SEQ ID NO: 199560 - protein, 7 aa, synthetic construct
  VARIANT 2: note = Any amino acid
  VARIANT 4: note = Any amino acid
RXSXTAP

SEQ ID NO: 199561 - protein, 7 aa, synthetic construct
  VARIANT 2: note = Any amino acid
  VARIANT 5: note = Any amino acid
RXSNXNA

SEQ ID NO: 199562 - protein, 7 aa, synthetic construct
  VARIANT 4: note = Any amino acid
  VARIANT 5: note = Any amino acid
RMPXXGA

SEQ ID NO: 199563 - protein, 7 aa, synthetic construct
  VARIANT 3: note = Any amino acid
  VARIANT 4: note = Any amino acid
KTXXSGG

SEQ ID NO: 199564 - protein, 7 aa, synthetic construct
  VARIANT 2: note = Any amino acid
  VARIANT 4: note = Any amino acid
RXPXTGA

SEQ ID NO: 199565 - protein, 7 aa, synthetic construct
  VARIANT 2: note = Any amino acid
  VARIANT 3: note = asparagine or glutamine
  VARIANT 6: note = Any amino acid
KXXSTXA

SEQ ID NO: 199566 - protein, 7 aa, synthetic construct
  VARIANT 4: note = threonine or valine
  VARIANT 5: note = Any amino acid
  VARIANT 6: note = Any amino acid
MKNXXXA

SEQ ID NO: 199567 - protein, 7 aa, synthetic construct
  VARIANT 5: note = Any amino acid
  VARIANT 6: note = Any amino acid
KGNNXXG

SEQ ID NO: 199568 - protein, 7 aa, synthetic construct
  VARIANT 4: note = Any amino acid
  VARIANT 5: note = Any amino acid
TKPXXAA

SEQ ID NO: 199569 - protein, 7 aa, synthetic construct
  VARIANT 3: note = Any amino acid
  VARIANT 6: note = Any amino acid
TRXGTXG

SEQ ID NO: 199570 - protein, 7 aa, synthetic construct
  VARIANT 3: note = Any amino acid
  VARIANT 5: note = Any amino acid
KNXGXSA

SEQ ID NO: 199571 - protein, 7 aa, synthetic construct
  VARIANT 2: note = Any amino acid
  VARIANT 6: note = Any amino acid
KXASSXA

SEQ ID NO: 199572 - protein, 7 aa, synthetic construct
  VARIANT 5: note = Any amino acid
  VARIANT 6: note = Any amino acid
KLNSXXG

SEQ ID NO: 199573 - protein, 7 aa, synthetic construct
  VARIANT 4: note = Any amino acid
  VARIANT 6: note = Any amino acid
QNRXAXP

SEQ ID NO: 199574 - protein, 7 aa, synthetic construct
  VARIANT 2: note = Any amino acid
  VARIANT 4: note = Any amino acid
RXPXAGA

SEQ ID NO: 199575 - protein, 7 aa, synthetic construct
  VARIANT 3: note = Any amino acid
  VARIANT 4: note = Any amino acid
RTXXSTP

SEQ ID NO: 199576 - protein, 7 aa, synthetic construct
  VARIANT 5: note = Any amino acid
SRTTXNG

SEQ ID NO: 199577 - protein, 7 aa, synthetic construct
  VARIANT 2: note = Any amino acid
  VARIANT 5: note = Any amino acid
TXRTXNA

SEQ ID NO: 199578 - protein, 7 aa, synthetic construct
  VARIANT 3: note = Any amino acid
  VARIANT 6: note = Any amino acid
TKXNSXG

SEQ ID NO: 199579 - protein, 7 aa, synthetic construct
  VARIANT 4: note = Any amino acid
  VARIANT 5: note = Any amino acid
TRPXXAA

SEQ ID NO: 199580 - protein, 7 aa, synthetic construct
  VARIANT 5: note = Any amino acid
  VARIANT 6: note = Any amino acid
QSRTXXP

SEQ ID NO: 199581 - protein, 7 aa, synthetic construct
  VARIANT 3: note = Any amino acid
  VARIANT 5: note = Any amino acid
RNXPXTS

SEQ ID NO: 199582 - protein, 7 aa, synthetic construct
  VARIANT 2: note = Any amino acid
  VARIANT 3: note = Any amino acid
KXXGPKD

SEQ ID NO: 199583 - protein, 7 aa, synthetic construct
  VARIANT 5: note = Any amino acid
  VARIANT 6: note = Any amino acid
NRGQXXA

SEQ ID NO: 199584 - protein, 7 aa, synthetic construct
  VARIANT 2: note = Any amino acid
  VARIANT 3: note = Any amino acid
AXXNEKR

SEQ ID NO: 199585 - protein, 7 aa, synthetic construct
  VARIANT 3: note = Any amino acid
  VARIANT 4: note = Any amino acid
TGXXRSG

SEQ ID NO: 199586 - protein, 7 aa, synthetic construct
  VARIANT 4: note = Any amino acid
  VARIANT 6: note = Any amino acid
TANXRXG

SEQ ID NO: 199587 - protein, 7 aa, synthetic construct
  VARIANT 2: note = Any amino acid
  VARIANT 6: note = Any amino acid
TXTNRXG

SEQ ID NO: 199588 - protein, 7 aa, synthetic construct
  VARIANT 4: note = Any amino acid
  VARIANT 5: note = Any amino acid
QSRXXNP

SEQ ID NO: 199589 - protein, 7 aa, synthetic construct
  VARIANT 2: note = Any amino acid
  VARIANT 3: note = Any amino acid
KXXNPAN

SEQ ID NO: 199590 - protein, 7 aa, synthetic construct
  VARIANT 3: note = Any amino acid
  VARIANT 4: note = Any amino acid
KMXXPKD

SEQ ID NO: 199591 - protein, 7 aa, synthetic construct
  VARIANT 5: note = Any amino acid
  VARIANT 6: note = Any amino acid
MSRNXXA

SEQ ID NO: 199592 - protein, 7 aa, synthetic construct
  VARIANT 4: note = Any amino acid
  VARIANT 5: note = Any amino acid
NDAXXKK

SEQ ID NO: 199593 - protein, 7 aa, synthetic construct
  VARIANT 3: note = Any amino acid
  VARIANT 6: note = Any amino acid
QRXGPXM

SEQ ID NO: 199594 - protein, 7 aa, synthetic construct
  VARIANT 3: note = Any amino acid
  VARIANT 5: note = Any amino acid
RSXPXNA

SEQ ID NO: 199595 - protein, 7 aa, synthetic construct
  VARIANT 4: note = Any amino acid
  VARIANT 6: note = Any amino acid
VARXHXG

SEQ ID NO: 199596 - protein, 7 aa, synthetic construct
  VARIANT 2: note = Any amino acid
  VARIANT 6: note = Any amino acid
MXSKSXA

SEQ ID NO: 199597 - protein, 7 aa, synthetic construct
  VARIANT 2: note = Any amino acid
  VARIANT 3: note = Any amino acid
RXXKEEK

SEQ ID NO: 199598 - protein, 7 aa, synthetic construct
  VARIANT 4: note = Any amino acid
  VARIANT 5: note = Any amino acid
  VARIANT 6: note = alanine or threonine
TGKXXXA

SEQ ID NO: 199599 - protein, 7 aa, synthetic construct
  VARIANT 2: note = Any amino acid
  VARIANT 3: note = Any amino acid
RXXAGVG

SEQ ID NO: 199600 - protein, 7 aa, synthetic construct
  VARIANT 4: note = Any amino acid
  VARIANT 5: note = Any amino acid
MKSXXTG

SEQ ID NO: 199601 - protein, 7 aa, synthetic construct
  VARIANT 2: note = Any amino acid
  VARIANT 6: note = Any amino acid
GXKSVXG

SEQ ID NO: 199602 - protein, 7 aa, synthetic construct
  VARIANT 4: note = Any amino acid
  VARIANT 5: note = Any amino acid
TNKXXQG

SEQ ID NO: 199603 - protein, 7 aa, synthetic construct
  VARIANT 4: note = Any amino acid
  VARIANT 6: note = Any amino acid
NARXTXG

SEQ ID NO: 199604 - protein, 7 aa, synthetic construct
  VARIANT 3: note = Any amino acid
  VARIANT 6: note = Any amino acid
MRXNQXG

SEQ ID NO: 199605 - protein, 7 aa, synthetic construct
  VARIANT 3: note = Any amino acid
  VARIANT 4: note = Any amino acid
KTXXGGA

SEQ ID NO: 199606 - protein, 7 aa, synthetic construct
  VARIANT 2: note = Any amino acid
  VARIANT 6: note = Any amino acid
VXNKVXG

SEQ ID NO: 199607 - protein, 7 aa, synthetic construct
  VARIANT 4: note = Any amino acid
  VARIANT 5: note = Any amino acid
FKGXXSA

SEQ ID NO: 199608 - protein, 7 aa, synthetic construct
  VARIANT 4: note = Any amino acid
  VARIANT 5: note = Any amino acid
FNKXXQG

SEQ ID NO: 199609 - protein, 7 aa, synthetic construct
  VARIANT 4: note = Any amino acid
  VARIANT 6: note = Any amino acid
GPKXTXA

SEQ ID NO: 199610 - protein, 7 aa, synthetic construct
  VARIANT 4: note = Any amino acid
  VARIANT 6: note = Any amino acid
KQSXSXP

SEQ ID NO: 199611 - protein, 7 aa, synthetic construct
  VARIANT 3: note = Any amino acid
  VARIANT 5: note = Any amino acid
GPXGXKG

SEQ ID NO: 199612 - protein, 7 aa, synthetic construct
  VARIANT 5: note = Any amino acid
  VARIANT 6: note = Any amino acid
RDKSXXA

SEQ ID NO: 199613 - protein, 7 aa, synthetic construct
  VARIANT 3: note = Any amino acid
  VARIANT 4: note = Any amino acid
KTXXAGG

SEQ ID NO: 199614 - protein, 7 aa, synthetic construct
  VARIANT 3: note = Any amino acid
  VARIANT 4: note = Any amino acid
FKXXTQG

SEQ ID NO: 199615 - protein, 7 aa, synthetic construct
  VARIANT 4: note = Any amino acid
  VARIANT 5: note = Any amino acid
FGKXXTG

SEQ ID NO: 199616 - protein, 7 aa, synthetic construct
  VARIANT 5: note = Any amino acid
  VARIANT 6: note = Any amino acid
NKTGXXA

SEQ ID NO: 199617 - protein, 7 aa, synthetic construct
  VARIANT 3: note = Any amino acid
  VARIANT 4: note = Any amino acid
TKXXTYG

SEQ ID NO: 199618 - protein, 7 aa, synthetic construct
  VARIANT 5: note = Any amino acid
  VARIANT 6: note = Any amino acid
TKPGXXG

SEQ ID NO: 199619 - protein, 7 aa, synthetic construct
  VARIANT 3: note = Any amino acid
  VARIANT 5: note = Any amino acid
KPXTXGG

SEQ ID NO: 199620 - protein, 7 aa, synthetic construct
  VARIANT 4: note = Any amino acid
  VARIANT 5: note = Any amino acid
TGKXXSA

SEQ ID NO: 199621 - protein, 7 aa, synthetic construct
  VARIANT 4: note = Any amino acid
  VARIANT 6: note = Any amino acid
KPNXSXA

SEQ ID NO: 199622 - protein, 7 aa, synthetic construct
  VARIANT 5: note = Any amino acid
  VARIANT 6: note = Any amino acid
TGKSXXA

SEQ ID NO: 199623 - protein, 7 aa, synthetic construct
  VARIANT 2: note = Any amino acid
  VARIANT 5: note = Any amino acid
VXKSXTG

SEQ ID NO: 199624 - protein, 7 aa, synthetic construct
  VARIANT 2: note = Any amino acid
  VARIANT 4: note = Any amino acid
FXKXTSA

SEQ ID NO: 199625 - protein, 7 aa, synthetic construct
  VARIANT 4: note = Any amino acid
  VARIANT 5: note = Any amino acid
FGKXXSG

SEQ ID NO: 199626 - protein, 7 aa, synthetic construct
  VARIANT 2: note = Any amino acid
  VARIANT 5: note = Any amino acid
KXGGXAG

SEQ ID NO: 199627 - protein, 7 aa, synthetic construct
  VARIANT 4: note = Any amino acid
  VARIANT 6: note = Any amino acid
KPSXNXA

SEQ ID NO: 199628 - protein, 7 aa, synthetic construct
  VARIANT 3: note = Any amino acid
  VARIANT 5: note = Any amino acid
RPXNXGG

SEQ ID NO: 199629 - protein, 7 aa, synthetic construct
  VARIANT 3: note = Any amino acid
  VARIANT 4: note = Any amino acid
TKXXTQG

SEQ ID NO: 199630 - protein, 7 aa, synthetic construct
  VARIANT 5: note = Any amino acid
  VARIANT 6: note = Any amino acid
TKSSXXA

SEQ ID NO: 199631 - protein, 7 aa, synthetic construct
  VARIANT 2: note = Any amino acid
  VARIANT 6: note = Any amino acid
VXKSQXG

SEQ ID NO: 199632 - protein, 7 aa, synthetic construct
  VARIANT 4: note = Any amino acid
  VARIANT 5: note = Any amino acid
NARXXGG

SEQ ID NO: 199633 - protein, 7 aa, synthetic construct
  VARIANT 3: note = Any amino acid
  VARIANT 4: note = Any amino acid
VRXXSSA

SEQ ID NO: 199634 - protein, 7 aa, synthetic construct
  VARIANT 2: note = Any amino acid
  VARIANT 6: note = Any amino acid
RXKDSXA

SEQ ID NO: 199635 - protein, 7 aa, synthetic construct
  VARIANT 2: note = Any amino acid
  VARIANT 3: note = Any amino acid
GXXSIRS

SEQ ID NO: 199636 - protein, 7 aa, synthetic construct
  VARIANT 5: note = Any amino acid
  VARIANT 6: note = Any amino acid
GQSSXXR

SEQ ID NO: 199637 - protein, 7 aa, synthetic construct
  VARIANT 2: note = Any amino acid
  VARIANT 5: note = Any amino acid
MXKPXRD

SEQ ID NO: 199638 - protein, 7 aa, synthetic construct
  VARIANT 3: note = Any amino acid
  VARIANT 6: note = Any amino acid
NKXDRXG

SEQ ID NO: 199639 - protein, 7 aa, synthetic construct
  VARIANT 4: note = Any amino acid
  VARIANT 6: note = Any amino acid
QRPXAXA

SEQ ID NO: 199640 - protein, 7 aa, synthetic construct
  VARIANT 3: note = Any amino acid
  VARIANT 4: note = Any amino acid
SPXXRGG

SEQ ID NO: 199641 - protein, 7 aa, synthetic construct
  VARIANT 2: note = Any amino acid
  VARIANT 4: note = Any amino acid
VXNXSSA

SEQ ID NO: 199642 - protein, 7 aa, synthetic construct
  VARIANT 2: note = Any amino acid
  VARIANT 4: note = Any amino acid
TXNXSKG

SEQ ID NO: 199643 - protein, 7 aa, synthetic construct
  VARIANT 2: note = Any amino acid
  VARIANT 4: note = Any amino acid
GXKXTAA

SEQ ID NO: 199644 - protein, 7 aa, synthetic construct
  VARIANT 4: note = Any amino acid
  VARIANT 5: note = Any amino acid
  VARIANT 6: note = alanine, serine or threonine
TGKXXXA

SEQ ID NO: 199645 - protein, 7 aa, synthetic construct
  VARIANT 3: note = Any amino acid
  VARIANT 4: note = Any amino acid
TGXXMKG

SEQ ID NO: 199646 - protein, 7 aa, synthetic construct
  VARIANT 1: note = phenylalanine or valine
  VARIANT 2: note = Any amino acid
  VARIANT 4: note = Any amino acid
XXKXTSA

SEQ ID NO: 199647 - protein, 7 aa, synthetic construct
  VARIANT 1: note = asparagine or proline
  VARIANT 3: note = Any amino acid
  VARIANT 5: note = Any amino acid
XKXSXGG

SEQ ID NO: 199648 - protein, 7 aa, synthetic construct
  VARIANT 3: note = Any amino acid
  VARIANT 4: note = Any amino acid
  VARIANT 6: note = serine or threonine
NKXXGXA

SEQ ID NO: 199649 - protein, 7 aa, synthetic construct
  VARIANT 1: note = glutamine or glycine
  VARIANT 4: note = Any amino acid
  VARIANT 5: note = Any amino acid
XKNXXSA

SEQ ID NO: 199650 - protein, 7 aa, synthetic construct
  VARIANT 4: note = Any amino acid
  VARIANT 5: note = Any amino acid
TKSXXSN

SEQ ID NO: 199651 - protein, 7 aa, synthetic construct
  VARIANT 5: note = Any amino acid
  VARIANT 6: note = Any amino acid
MKNTXXA

SEQ ID NO: 199652 - protein, 7 aa, synthetic construct
  VARIANT 2: note = Any amino acid
  VARIANT 3: note = Any amino acid
QXXKSNA

SEQ ID NO: 199653 - protein, 7 aa, synthetic construct
  VARIANT 3: note = Any amino acid
  VARIANT 4: note = Any amino acid
NNXXSKG

SEQ ID NO: 199654 - protein, 7 aa, synthetic construct
  VARIANT 2: note = Any amino acid
  VARIANT 4: note = Any amino acid
MXNXGNA

SEQ ID NO: 199655 - protein, 7 aa, synthetic construct
  VARIANT 4: note = Any amino acid
  VARIANT 6: note = Any amino acid
KTQXSXS

SEQ ID NO: 199656 - protein, 7 aa, synthetic construct
  VARIANT 2: note = Any amino acid
  VARIANT 3: note = Any amino acid
TXXSGTP

SEQ ID NO: 199657 - protein, 7 aa, synthetic construct
  VARIANT 2: note = Any amino acid
  VARIANT 5: note = Any amino acid
QXKPXQG

SEQ ID NO: 199658 - protein, 7 aa, synthetic construct
  VARIANT 3: note = Any amino acid
  VARIANT 4: note = Any amino acid
KAXXGDR

SEQ ID NO: 199659 - protein, 7 aa, synthetic construct
  VARIANT 2: note = Any amino acid
  VARIANT 5: note = Any amino acid
KXTGXRE

SEQ ID NO: 199660 - protein, 7 aa, synthetic construct
  VARIANT 2: note = Any amino acid
  VARIANT 4: note = Any amino acid
MXKXTSG

SEQ ID NO: 199661 - protein, 7 aa, synthetic construct
  VARIANT 2: note = Any amino acid
  VARIANT 4: note = Any amino acid
TXKXSSA

SEQ ID NO: 199662 - protein, 7 aa, synthetic construct
  VARIANT 4: note = Any amino acid
  VARIANT 6: note = Any amino acid
YQKXSXS

SEQ ID NO: 199663 - protein, 7 aa, synthetic construct
  VARIANT 3: note = Any amino acid
  VARIANT 5: note = Any amino acid
MKXTXTA

SEQ ID NO: 199664 - protein, 7 aa, synthetic construct
  VARIANT 3: note = Any amino acid
  VARIANT 4: note = Any amino acid
TKXXGMG

SEQ ID NO: 199665 - protein, 7 aa, synthetic construct
  VARIANT 4: note = Any amino acid
  VARIANT 6: note = Any amino acid
MPKXSXS

SEQ ID NO: 199666 - protein, 7 aa, synthetic construct
  VARIANT 3: note = Any amino acid
  VARIANT 6: note = Any amino acid
DLXKPXK

SEQ ID NO: 199667 - protein, 7 aa, synthetic construct
  VARIANT 5: note = Any amino acid
  VARIANT 6: note = Any amino acid
KGNTXXA

SEQ ID NO: 199668 - protein, 7 aa, synthetic construct
  VARIANT 3: note = Any amino acid
  VARIANT 5: note = Any amino acid
MKXGXTG

SEQ ID NO: 199669 - protein, 7 aa, synthetic construct
  VARIANT 2: note = Any amino acid
  VARIANT 3: note = Any amino acid
NXXSTMA

SEQ ID NO: 199670 - protein, 7 aa, synthetic construct
  VARIANT 3: note = Any amino acid
  VARIANT 4: note = Any amino acid
NKXXSDK

SEQ ID NO: 199671 - protein, 7 aa, synthetic construct
  VARIANT 2: note = Any amino acid
  VARIANT 4: note = Any amino acid
TXKXSNS

SEQ ID NO: 199672 - protein, 7 aa, synthetic construct
  VARIANT 2: note = Any amino acid
  VARIANT 5: note = Any amino acid
TXKGXVG

SEQ ID NO: 199673 - protein, 7 aa, synthetic construct
  VARIANT 4: note = Any amino acid
  VARIANT 5: note = Any amino acid
TKQXXSA

SEQ ID NO: 199674 - protein, 7 aa, synthetic construct
  VARIANT 3: note = Any amino acid
  VARIANT 4: note = Any amino acid
KQXXAKD

SEQ ID NO: 199675 - protein, 7 aa, synthetic construct
  VARIANT 3: note = Any amino acid
  VARIANT 4: note = Any amino acid
NRXXGGA

SEQ ID NO: 199676 - protein, 7 aa, synthetic construct
  VARIANT 4: note = Any amino acid
  VARIANT 5: note = Any amino acid
KKDXXRD

SEQ ID NO: 199677 - protein, 7 aa, synthetic construct
  VARIANT 5: note = Any amino acid
  VARIANT 6: note = Any amino acid
QRNSXXA

SEQ ID NO: 199678 - protein, 7 aa, synthetic construct
  VARIANT 4: note = Any amino acid
  VARIANT 5: note = Any amino acid
KKDXXKD

SEQ ID NO: 199679 - protein, 7 aa, synthetic construct
  VARIANT 3: note = Any amino acid
  VARIANT 4: note = Any amino acid
RNXXSGA

SEQ ID NO: 199680 - protein, 7 aa, synthetic construct
  VARIANT 1: note = threonine or valine
  VARIANT 5: note = Any amino acid
  VARIANT 6: note = Any amino acid
XKPSXXG

SEQ ID NO: 199681 - protein, 7 aa, synthetic construct
  VARIANT 4: note = Any amino acid
  VARIANT 5: note = Any amino acid
KPTXXMA

SEQ ID NO: 199682 - protein, 7 aa, synthetic construct
  VARIANT 2: note = Any amino acid
  VARIANT 6: note = Any amino acid
QXPTSXA

SEQ ID NO: 199683 - protein, 7 aa, synthetic construct
  VARIANT 3: note = Any amino acid
  VARIANT 4: note = Any amino acid
QRXXSTA

SEQ ID NO: 199684 - protein, 7 aa, synthetic construct
  VARIANT 2: note = Any amino acid
  VARIANT 5: note = Any amino acid
KXSTXNG

SEQ ID NO: 199685 - protein, 7 aa, synthetic construct
  VARIANT 5: note = Any amino acid
  VARIANT 6: note = Any amino acid
QRSSXXG

SEQ ID NO: 199686 - protein, 7 aa, synthetic construct
  VARIANT 3: note = Any amino acid
  VARIANT 6: note = Any amino acid
KNXGQXG

SEQ ID NO: 199687 - protein, 7 aa, synthetic construct
  VARIANT 2: note = Any amino acid
  VARIANT 4: note = Any amino acid
KXSXQSA

SEQ ID NO: 199688 - protein, 7 aa, synthetic construct
  VARIANT 4: note = Any amino acid
  VARIANT 6: note = Any amino acid
QKNXAXA

SEQ ID NO: 199689 - protein, 7 aa, synthetic construct
  VARIANT 3: note = Any amino acid
  VARIANT 4: note = Any amino acid
RPXXMAG

SEQ ID NO: 199690 - protein, 7 aa, synthetic construct
  VARIANT 2: note = Any amino acid
  VARIANT 4: note = Any amino acid
NXKXGGG

SEQ ID NO: 199691 - protein, 7 aa, synthetic construct
  VARIANT 4: note = Any amino acid
  VARIANT 5: note = Any amino acid
KTTXXGG

SEQ ID NO: 199692 - protein, 7 aa, synthetic construct
  VARIANT 4: note = Any amino acid
  VARIANT 5: note = Any amino acid
YKQXXGG

SEQ ID NO: 199693 - protein, 7 aa, synthetic construct
  VARIANT 2: note = Any amino acid
  VARIANT 4: note = Any amino acid
NXKXSNP

SEQ ID NO: 199694 - protein, 7 aa, synthetic construct
  VARIANT 4: note = Any amino acid
  VARIANT 6: note = Any amino acid
NKNXGXA

SEQ ID NO: 199695 - protein, 7 aa, synthetic construct
  VARIANT 2: note = Any amino acid
  VARIANT 3: note = Any amino acid
SXXKTGG

SEQ ID NO: 199696 - protein, 7 aa, synthetic construct
  VARIANT 3: note = Any amino acid
  VARIANT 6: note = Any amino acid
GNXVKXG

SEQ ID NO: 199697 - protein, 7 aa, synthetic construct
  VARIANT 3: note = Any amino acid
  VARIANT 4: note = Any amino acid
MKXXSAG

SEQ ID NO: 199698 - protein, 7 aa, synthetic construct
  VARIANT 2: note = Any amino acid
  VARIANT 4: note = Any amino acid
NXKXSQG

SEQ ID NO: 199699 - protein, 7 aa, synthetic construct
  VARIANT 5: note = Any amino acid
  VARIANT 6: note = Any amino acid
NRPSXXP

SEQ ID NO: 199700 - protein, 7 aa, synthetic construct
  VARIANT 4: note = Any amino acid
  VARIANT 5: note = Any amino acid
QKTXXGG

SEQ ID NO: 199701 - protein, 7 aa, synthetic construct
  VARIANT 3: note = Any amino acid
  VARIANT 5: note = Any amino acid
RSXQXQS

SEQ ID NO: 199702 - protein, 7 aa, synthetic construct
  VARIANT 2: note = Any amino acid
  VARIANT 5: note = Any amino acid
TXRTXGG

SEQ ID NO: 199703 - protein, 7 aa, synthetic construct
  VARIANT 4: note = Any amino acid
  VARIANT 6: note = Any amino acid
KKDXKXD

SEQ ID NO: 199704 - protein, 7 aa, synthetic construct
  VARIANT 5: note = Any amino acid
  VARIANT 6: note = Any amino acid
QRPNXXA

SEQ ID NO: 199705 - protein, 7 aa, synthetic construct
  VARIANT 2: note = Any amino acid
  VARIANT 4: note = Any amino acid
QXKXAQG

SEQ ID NO: 199706 - protein, 7 aa, synthetic construct
  VARIANT 1: note = glutamine or methionine
  VARIANT 3: note = Any amino acid
  VARIANT 5: note = Any amino acid
XKXGXTG

SEQ ID NO: 199707 - protein, 7 aa, synthetic construct
  VARIANT 3: note = Any amino acid
  VARIANT 5: note = Any amino acid
TKXNXQG

SEQ ID NO: 199708 - protein, 7 aa, synthetic construct
  VARIANT 2: note = Any amino acid
  VARIANT 5: note = Any amino acid
KXSTXSG

SEQ ID NO: 199709 - protein, 7 aa, synthetic construct
  VARIANT 3: note = Any amino acid
  VARIANT 4: note = Any amino acid
MKXXSQG

SEQ ID NO: 199710 - protein, 7 aa, synthetic construct
  VARIANT 4: note = Any amino acid
  VARIANT 6: note = Any amino acid
TGTXRXG

SEQ ID NO: 199711 - protein, 7 aa, synthetic construct
  VARIANT 3: note = Any amino acid
  VARIANT 6: note = Any amino acid
GKXSTXA

SEQ ID NO: 199712 - protein, 7 aa, synthetic construct
  VARIANT 3: note = Any amino acid
  VARIANT 6: note = Any amino acid
MKXGSXG

SEQ ID NO: 199713 - protein, 7 aa, synthetic construct
  VARIANT 4: note = Any amino acid
  VARIANT 5: note = Any amino acid
MSKXXAG

SEQ ID NO: 199714 - protein, 7 aa, synthetic construct
  VARIANT 2: note = Any amino acid
  VARIANT 6: note = Any amino acid
KXPTTXG

SEQ ID NO: 199715 - protein, 7 aa, synthetic construct
  VARIANT 3: note = Any amino acid
  VARIANT 4: note = Any amino acid
MPXXSGS

SEQ ID NO: 199716 - protein, 7 aa, synthetic construct
  VARIANT 2: note = Any amino acid
  VARIANT 4: note = Any amino acid
QXKXSNG

SEQ ID NO: 199717 - protein, 7 aa, synthetic construct
  VARIANT 4: note = Any amino acid
  VARIANT 6: note = Any amino acid
QKYXTXG

SEQ ID NO: 199718 - protein, 7 aa, synthetic construct
  VARIANT 2: note = Any amino acid
  VARIANT 5: note = Any amino acid
RXPSXQG

SEQ ID NO: 199719 - protein, 7 aa, synthetic construct
  VARIANT 2: note = Any amino acid
  VARIANT 3: note = Any amino acid
TXXPTAG

SEQ ID NO: 199720 - protein, 7 aa, synthetic construct
  VARIANT 3: note = Any amino acid
  VARIANT 4: note = Any amino acid
NQXXRSA

SEQ ID NO: 199721 - protein, 7 aa, synthetic construct
  VARIANT 2: note = Any amino acid
  VARIANT 6: note = Any amino acid
SXQQRXG

SEQ ID NO: 199722 - protein, 7 aa, synthetic construct
  VARIANT 3: note = Any amino acid
  VARIANT 6: note = Any amino acid
SKXGNXA

SEQ ID NO: 199723 - protein, 7 aa, synthetic construct
  VARIANT 3: note = Any amino acid
  VARIANT 6: note = Any amino acid
TGXNKXA

SEQ ID NO: 199724 - protein, 7 aa, synthetic construct
  VARIANT 3: note = Any amino acid
  VARIANT 4: note = Any amino acid
RSXXTQS

SEQ ID NO: 199725 - protein, 7 aa, synthetic construct
  VARIANT 4: note = Any amino acid
  VARIANT 5: note = Any amino acid
KTQXXAS

SEQ ID NO: 199726 - protein, 7 aa, synthetic construct
  VARIANT 3: note = Any amino acid
  VARIANT 4: note = Any amino acid
RSXXGGG

SEQ ID NO: 199727 - protein, 7 aa, synthetic construct
  VARIANT 4: note = Any amino acid
  VARIANT 6: note = Any amino acid
KPPXTXG

SEQ ID NO: 199728 - protein, 7 aa, synthetic construct
  VARIANT 2: note = Any amino acid
  VARIANT 5: note = Any amino acid
SXTTXNG

SEQ ID NO: 199729 - protein, 7 aa, synthetic construct
  VARIANT 5: note = Any amino acid
  VARIANT 6: note = Any amino acid
KSPTXXA

SEQ ID NO: 199730 - protein, 7 aa, synthetic construct
  VARIANT 5: note = Any amino acid
  VARIANT 6: note = Any amino acid
SRTTXXG

SEQ ID NO: 199731 - protein, 7 aa, synthetic construct
  VARIANT 2: note = Any amino acid
  VARIANT 6: note = Any amino acid
KXNSTXA

SEQ ID NO: 199732 - protein, 7 aa, synthetic construct
  VARIANT 4: note = Any amino acid
  VARIANT 6: note = Any amino acid
TRSXTXG

SEQ ID NO: 199733 - protein, 7 aa, synthetic construct
  VARIANT 2: note = Any amino acid
  VARIANT 4: note = Any amino acid
KXSXSGA

SEQ ID NO: 199734 - protein, 7 aa, synthetic construct
  VARIANT 4: note = Any amino acid
  VARIANT 6: note = Any amino acid
VRPXTXG

SEQ ID NO: 199735 - protein, 7 aa, synthetic construct
  VARIANT 2: note = Any amino acid
  VARIANT 4: note = Any amino acid
YXTXSKG

SEQ ID NO: 199736 - protein, 7 aa, synthetic construct
  VARIANT 3: note = Any amino acid
  VARIANT 6: note = Any amino acid
TRXVSXG

SEQ ID NO: 199737 - protein, 7 aa, synthetic construct
  VARIANT 2: note = Any amino acid
  VARIANT 4: note = Any amino acid
KXPXSGG

SEQ ID NO: 199738 - protein, 7 aa, synthetic construct
  VARIANT 4: note = Any amino acid
  VARIANT 5: note = Any amino acid
KTSXXGG

SEQ ID NO: 199739 - protein, 7 aa, synthetic construct
  VARIANT 2: note = Any amino acid
  VARIANT 3: note = Any amino acid
NXXGQKG

SEQ ID NO: 199740 - protein, 7 aa, synthetic construct
  VARIANT 2: note = Any amino acid
  VARIANT 6: note = Any amino acid
NXGNRXA

SEQ ID NO: 199741 - protein, 7 aa, synthetic construct
  VARIANT 4: note = Any amino acid
  VARIANT 6: note = Any amino acid
QRPXSXA

SEQ ID NO: 199742 - protein, 7 aa, synthetic construct
  VARIANT 2: note = Any amino acid
  VARIANT 5: note = Any amino acid
RXQNXTG

SEQ ID NO: 199743 - protein, 7 aa, synthetic construct
  VARIANT 3: note = Any amino acid
  VARIANT 5: note = Any amino acid
RPXTXAP

SEQ ID NO: 199744 - protein, 7 aa, synthetic construct
  VARIANT 4: note = Any amino acid
  VARIANT 5: note = glycine or serine
  VARIANT 6: note = Any amino acid
MKNXXXG

SEQ ID NO: 199745 - protein, 7 aa, synthetic construct
  VARIANT 4: note = Any amino acid
  VARIANT 5: note = Any amino acid
  VARIANT 6: note = alanine or glutamine
TKPXXXA

SEQ ID NO: 199746 - protein, 7 aa, synthetic construct
  VARIANT 3: note = Any amino acid
  VARIANT 4: note = asparagine or proline
  VARIANT 6: note = Any amino acid
RQXXTXA

SEQ ID NO: 199747 - protein, 7 aa, synthetic construct
  VARIANT 3: note = Any amino acid
  VARIANT 5: note = Any amino acid
RTXTXSA

SEQ ID NO: 199748 - protein, 7 aa, synthetic construct
  VARIANT 5: note = Any amino acid
  VARIANT 6: note = Any amino acid
MRPNXXG

SEQ ID NO: 199749 - protein, 7 aa, synthetic construct
  VARIANT 3: note = Any amino acid
  VARIANT 5: note = Any amino acid
NKXTXSA

SEQ ID NO: 199750 - protein, 7 aa, synthetic construct
  VARIANT 4: note = Any amino acid
  VARIANT 5: note = Any amino acid
MRTXXSP

SEQ ID NO: 199751 - protein, 7 aa, synthetic construct
  VARIANT 3: note = Any amino acid
  VARIANT 4: note = Any amino acid
GNXXKNG

SEQ ID NO: 199752 - protein, 7 aa, synthetic construct
  VARIANT 3: note = Any amino acid
  VARIANT 6: note = Any amino acid
RTXGTXG

SEQ ID NO: 199753 - protein, 7 aa, synthetic construct
  VARIANT 4: note = Any amino acid
  VARIANT 6: note = Any amino acid
  VARIANT 7: note = glycine or serine
RPTXSXX

SEQ ID NO: 199754 - protein, 7 aa, synthetic construct
  VARIANT 2: note = Any amino acid
  VARIANT 3: note = Any amino acid
KXXGKSA

SEQ ID NO: 199755 - protein, 7 aa, synthetic construct
  VARIANT 1: note = glycine or valine
  VARIANT 4: note = Any amino acid
  VARIANT 5: note = Any amino acid
XKPXXNA

SEQ ID NO: 199756 - protein, 7 aa, synthetic construct
  VARIANT 4: note = Any amino acid
  VARIANT 6: note = Any amino acid
TGKXGXA

SEQ ID NO: 199757 - protein, 7 aa, synthetic construct
  VARIANT 3: note = Any amino acid
  VARIANT 6: note = Any amino acid
KPXGTXG

SEQ ID NO: 199758 - protein, 7 aa, synthetic construct
  VARIANT 3: note = Any amino acid
  VARIANT 6: note = Any amino acid
RPXQQXA

SEQ ID NO: 199759 - protein, 7 aa, synthetic construct
  VARIANT 5: note = Any amino acid
  VARIANT 6: note = Any amino acid
KPNNXXP

SEQ ID NO: 199760 - protein, 7 aa, synthetic construct
  VARIANT 2: note = Any amino acid
  VARIANT 3: note = Any amino acid
GXXQKSG

SEQ ID NO: 199761 - protein, 7 aa, synthetic construct
  VARIANT 3: note = Any amino acid
  VARIANT 4: note = Any amino acid
TGXXKTA

SEQ ID NO: 199762 - protein, 7 aa, synthetic construct
  VARIANT 3: note = Any amino acid
  VARIANT 4: note = Any amino acid
TNXXRQG

SEQ ID NO: 199763 - protein, 7 aa, synthetic construct
  VARIANT 3: note = Any amino acid
  VARIANT 5: note = Any amino acid
TGXKXSG

SEQ ID NO: 199764 - protein, 7 aa, synthetic construct
  VARIANT 2: note = Any amino acid
  VARIANT 5: note = Any amino acid
IXARXKE

SEQ ID NO: 199765 - protein, 7 aa, synthetic construct
  VARIANT 2: note = Any amino acid
  VARIANT 4: note = Any amino acid
NXKXNNG

SEQ ID NO: 199766 - protein, 7 aa, synthetic construct
  VARIANT 2: note = Any amino acid
  VARIANT 3: note = Any amino acid
GXXQKGG

SEQ ID NO: 199767 - protein, 7 aa, synthetic construct
  VARIANT 2: note = Any amino acid
  VARIANT 5: note = Any amino acid
KXATXKD

SEQ ID NO: 199768 - protein, 7 aa, synthetic construct
  VARIANT 2: note = Any amino acid
  VARIANT 6: note = Any amino acid
KXNQSXG

SEQ ID NO: 199769 - protein, 7 aa, synthetic construct
  VARIANT 2: note = Any amino acid
  VARIANT 4: note = Any amino acid
RXSXNVA

SEQ ID NO: 199770 - protein, 7 aa, synthetic construct
  VARIANT 3: note = Any amino acid
  VARIANT 6: note = Any amino acid
RPXGTXA

SEQ ID NO: 199771 - protein, 7 aa, synthetic construct
  VARIANT 3: note = Any amino acid
  VARIANT 4: note = Any amino acid
TSXXRTP

SEQ ID NO: 199772 - protein, 7 aa, synthetic construct
  VARIANT 5: note = Any amino acid
  VARIANT 6: note = Any amino acid
RQSAXXT

SEQ ID NO: 199773 - protein, 7 aa, synthetic construct
  VARIANT 5: note = Any amino acid
  VARIANT 6: note = Any amino acid
RAHSXXA

SEQ ID NO: 199774 - protein, 7 aa, synthetic construct
  VARIANT 3: note = Any amino acid
  VARIANT 5: note = Any amino acid
DGXKXKL

SEQ ID NO: 199775 - protein, 7 aa, synthetic construct
  VARIANT 3: note = Any amino acid
  VARIANT 5: note = Any amino acid
NRXAXDK

SEQ ID NO: 199776 - protein, 7 aa, synthetic construct
  VARIANT 2: note = Any amino acid
  VARIANT 4: note = Any amino acid
GXNXANR

SEQ ID NO: 199777 - protein, 7 aa, synthetic construct
  VARIANT 3: note = Any amino acid
  VARIANT 4: note = Any amino acid
RQXXNST

SEQ ID NO: 199778 - protein, 7 aa, synthetic construct
  VARIANT 2: note = Any amino acid
  VARIANT 5: note = Any amino acid
TXGGXRN

SEQ ID NO: 199779 - protein, 7 aa, synthetic construct
  VARIANT 2: note = Any amino acid
  VARIANT 4: note = Any amino acid
QXGXVRG

SEQ ID NO: 199780 - protein, 7 aa, synthetic construct
  VARIANT 4: note = Any amino acid
  VARIANT 5: note = Any amino acid
MDKXXQR

SEQ ID NO: 199781 - protein, 7 aa, synthetic construct
  VARIANT 4: note = Any amino acid
  VARIANT 5: note = Any amino acid
NGGXXGR

SEQ ID NO: 199782 - protein, 7 aa, synthetic construct
  VARIANT 2: note = Any amino acid
  VARIANT 5: note = Any amino acid
VXRQXAG

SEQ ID NO: 199783 - protein, 7 aa, synthetic construct
  VARIANT 2: note = Any amino acid
  VARIANT 6: note = Any amino acid
LXREGXR

SEQ ID NO: 199784 - protein, 7 aa, synthetic construct
  VARIANT 4: note = Any amino acid
  VARIANT 5: note = Any amino acid
QAGXXRG

SEQ ID NO: 199785 - protein, 7 aa, synthetic construct
  VARIANT 3: note = Any amino acid
  VARIANT 6: note = Any amino acid
QRXVVXA

SEQ ID NO: 199786 - protein, 7 aa, synthetic construct
  VARIANT 3: note = Any amino acid
  VARIANT 4: note = Any amino acid
REXXARG

SEQ ID NO: 199787 - protein, 7 aa, synthetic construct
  VARIANT 5: note = Any amino acid
  VARIANT 6: note = Any amino acid
RQMAXXA

SEQ ID NO: 199788 - protein, 7 aa, synthetic construct
  VARIANT 2: note = Any amino acid
  VARIANT 3: note = Any amino acid
SXXREIR

SEQ ID NO: 199789 - protein, 7 aa, synthetic construct
  VARIANT 3: note = Any amino acid
  VARIANT 5: note = Any amino acid
TKXRXDT

SEQ ID NO: 199790 - protein, 7 aa, synthetic construct
  VARIANT 2: note = Any amino acid
  VARIANT 4: note = Any amino acid
VXRXSAG

SEQ ID NO: 199791 - protein, 7 aa, synthetic construct
  VARIANT 2: note = Any amino acid
  VARIANT 5: note = Any amino acid
VXRSXGG

SEQ ID NO: 199792 - protein, 7 aa, synthetic construct
  VARIANT 4: note = Any amino acid
  VARIANT 6: note = Any amino acid
VQRXSXG

SEQ ID NO: 199793 - protein, 7 aa, synthetic construct
  VARIANT 5: note = Any amino acid
  VARIANT 6: note = Any amino acid
NKPAXXS

SEQ ID NO: 199794 - protein, 7 aa, synthetic construct
  VARIANT 4: note = Any amino acid
  VARIANT 5: note = Any amino acid
PKSXXSG

SEQ ID NO: 199795 - protein, 7 aa, synthetic construct
  VARIANT 3: note = Any amino acid
  VARIANT 6: note = Any amino acid
TKXPSXS

SEQ ID NO: 199796 - protein, 7 aa, synthetic construct
  VARIANT 5: note = Any amino acid
  VARIANT 6: note = Any amino acid
FGKQXXS

SEQ ID NO: 199797 - protein, 7 aa, synthetic construct
  VARIANT 2: note = Any amino acid
  VARIANT 4: note = glutamine or threonine
  VARIANT 6: note = Any amino acid
KXNXSXA

SEQ ID NO: 199798 - protein, 7 aa, synthetic construct
  VARIANT 5: note = Any amino acid
  VARIANT 6: note = Any amino acid
NAKSXXG

SEQ ID NO: 199799 - protein, 7 aa, synthetic construct
  VARIANT 3: note = Any amino acid
  VARIANT 4: note = Any amino acid
KQXXTQA

SEQ ID NO: 199800 - protein, 7 aa, synthetic construct
  VARIANT 2: note = Any amino acid
  VARIANT 5: note = Any amino acid
KXTQXGA

SEQ ID NO: 199801 - protein, 7 aa, synthetic construct
  VARIANT 2: note = Any amino acid
  VARIANT 3: note = Any amino acid
TXXQSGF

SEQ ID NO: 199802 - protein, 7 aa, synthetic construct
  VARIANT 4: note = Any amino acid
  VARIANT 6: note = Any amino acid
KTQXTXG

SEQ ID NO: 199803 - protein, 7 aa, synthetic construct
  VARIANT 3: note = Any amino acid
  VARIANT 4: note = Any amino acid
QKXXGAP

SEQ ID NO: 199804 - protein, 7 aa, synthetic construct
  VARIANT 3: note = Any amino acid
  VARIANT 4: note = Any amino acid
SKXXNAA

SEQ ID NO: 199805 - protein, 7 aa, synthetic construct
  VARIANT 2: note = Any amino acid
  VARIANT 4: note = Any amino acid
RXNXANP

SEQ ID NO: 199806 - protein, 7 aa, synthetic construct
  VARIANT 4: note = Any amino acid
  VARIANT 6: note = Any amino acid
GKQXSXP

SEQ ID NO: 199807 - protein, 7 aa, synthetic construct
  VARIANT 5: note = Any amino acid
  VARIANT 6: note = Any amino acid
PQKSXXA

SEQ ID NO: 199808 - protein, 7 aa, synthetic construct
  VARIANT 3: note = Any amino acid
  VARIANT 4: note = Any amino acid
SQXXTNP

SEQ ID NO: 199809 - protein, 7 aa, synthetic construct
  VARIANT 3: note = Any amino acid
  VARIANT 5: note = Any amino acid
PRXQXSP

SEQ ID NO: 199810 - protein, 7 aa, synthetic construct
  VARIANT 3: note = Any amino acid
  VARIANT 5: note = Any amino acid
NGXRXTP

SEQ ID NO: 199811 - protein, 7 aa, synthetic construct
  VARIANT 4: note = Any amino acid
  VARIANT 5: note = Any amino acid
TKMXXQA

SEQ ID NO: 199812 - protein, 7 aa, synthetic construct
  VARIANT 3: note = Any amino acid
  VARIANT 6: note = Any amino acid
NKXTNXS

SEQ ID NO: 199813 - protein, 7 aa, synthetic construct
  VARIANT 3: note = Any amino acid
  VARIANT 6: note = Any amino acid
PKXGNXA

SEQ ID NO: 199814 - protein, 7 aa, synthetic construct
  VARIANT 5: note = Any amino acid
  VARIANT 6: note = Any amino acid
FQKAXXG

SEQ ID NO: 199815 - protein, 7 aa, synthetic construct
  VARIANT 2: note = Any amino acid
  VARIANT 5: note = Any amino acid
GXKTXQA

SEQ ID NO: 199816 - protein, 7 aa, synthetic construct
  VARIANT 2: note = Any amino acid
  VARIANT 3: note = Any amino acid
KXXTSQS

SEQ ID NO: 199817 - protein, 7 aa, synthetic construct
  VARIANT 4: note = Any amino acid
  VARIANT 6: note = Any amino acid
MNQXRXP

SEQ ID NO: 199818 - protein, 7 aa, synthetic construct
  VARIANT 3: note = Any amino acid
  VARIANT 5: note = Any amino acid
RQXAXTS

SEQ ID NO: 199819 - protein, 7 aa, synthetic construct
  VARIANT 3: note = Any amino acid
  VARIANT 4: note = Any amino acid
SKXXNQP

SEQ ID NO: 199820 - protein, 7 aa, synthetic construct
  VARIANT 4: note = Any amino acid
  VARIANT 5: note = Any amino acid
TKNXXQS

SEQ ID NO: 199821 - protein, 7 aa, synthetic construct
  VARIANT 2: note = Any amino acid
  VARIANT 3: note = Any amino acid
GXXTKMG

SEQ ID NO: 199822 - protein, 7 aa, synthetic construct
  VARIANT 2: note = Any amino acid
  VARIANT 4: note = asparagine or serine
  VARIANT 5: note = Any amino acid
KXPXXGA

SEQ ID NO: 199823 - protein, 7 aa, synthetic construct
  VARIANT 4: note = Any amino acid
  VARIANT 6: note = Any amino acid
AKYXKXE

SEQ ID NO: 199824 - protein, 7 aa, synthetic construct
  VARIANT 2: note = Any amino acid
  VARIANT 5: note = Any amino acid
KXPTXTG

SEQ ID NO: 199825 - protein, 7 aa, synthetic construct
  VARIANT 5: note = Any amino acid
  VARIANT 6: note = Any amino acid
KRPDXXG

SEQ ID NO: 199826 - protein, 7 aa, synthetic construct
  VARIANT 2: note = Any amino acid
  VARIANT 6: note = Any amino acid
RXSSVXG

SEQ ID NO: 199827 - protein, 7 aa, synthetic construct
  VARIANT 5: note = Any amino acid
  VARIANT 6: note = Any amino acid
KSSSXXG

SEQ ID NO: 199828 - protein, 7 aa, synthetic construct
  VARIANT 3: note = Any amino acid
  VARIANT 5: note = Any amino acid
TKXSXYA

SEQ ID NO: 199829 - protein, 7 aa, synthetic construct
  VARIANT 3: note = Any amino acid
  VARIANT 5: note = Any amino acid
FKXSXQG

SEQ ID NO: 199830 - protein, 7 aa, synthetic construct
  VARIANT 2: note = Any amino acid
  VARIANT 3: note = Any amino acid
KXXNTTG

SEQ ID NO: 199831 - protein, 7 aa, synthetic construct
  VARIANT 3: note = Any amino acid
  VARIANT 5: note = Any amino acid
FKXPXQG

SEQ ID NO: 199832 - protein, 7 aa, synthetic construct
  VARIANT 4: note = Any amino acid
  VARIANT 5: note = Any amino acid
FKMXXQG

SEQ ID NO: 199833 - protein, 7 aa, synthetic construct
  VARIANT 3: note = Any amino acid
  VARIANT 6: note = Any amino acid
GKXVSXN

SEQ ID NO: 199834 - protein, 7 aa, synthetic construct
  VARIANT 2: note = Any amino acid
  VARIANT 6: note = Any amino acid
KXSSVXG

SEQ ID NO: 199835 - protein, 7 aa, synthetic construct
  VARIANT 3: note = Any amino acid
  VARIANT 4: note = Any amino acid
KFXXTSG

SEQ ID NO: 199836 - protein, 7 aa, synthetic construct
  VARIANT 5: note = Any amino acid
  VARIANT 6: note = Any amino acid
KGSSXXP

SEQ ID NO: 199837 - protein, 7 aa, synthetic construct
  VARIANT 2: note = Any amino acid
  VARIANT 4: note = Any amino acid
NXKXGMG

SEQ ID NO: 199838 - protein, 7 aa, synthetic construct
  VARIANT 4: note = Any amino acid
  VARIANT 6: note = Any amino acid
YKPXTXP

SEQ ID NO: 199839 - protein, 7 aa, synthetic construct
  VARIANT 2: note = Any amino acid
  VARIANT 5: note = Any amino acid
KXPGXQG

SEQ ID NO: 199840 - protein, 7 aa, synthetic construct
  VARIANT 2: note = Any amino acid
  VARIANT 6: note = Any amino acid
SXNAHXR

SEQ ID NO: 199841 - protein, 7 aa, synthetic construct
  VARIANT 2: note = Any amino acid
  VARIANT 3: note = Any amino acid
RXXVRDV

SEQ ID NO: 199842 - protein, 7 aa, synthetic construct
  VARIANT 3: note = Any amino acid
  VARIANT 4: note = proline or serine
  VARIANT 5: note = Any amino acid
FKXXXQG

SEQ ID NO: 199843 - protein, 7 aa, synthetic construct
  VARIANT 4: note = Any amino acid
  VARIANT 6: note = Any amino acid
MGSXKXG

SEQ ID NO: 199844 - protein, 7 aa, synthetic construct
  VARIANT 2: note = Any amino acid
  VARIANT 5: note = Any amino acid
GXTQXSG

SEQ ID NO: 199845 - protein, 7 aa, synthetic construct
  VARIANT 5: note = Any amino acid
  VARIANT 6: note = Any amino acid
YKPPXXG

SEQ ID NO: 199846 - protein, 7 aa, synthetic construct
  VARIANT 3: note = Any amino acid
  VARIANT 4: note = Any amino acid
SKXXYGA

SEQ ID NO: 199847 - protein, 7 aa, synthetic construct
  VARIANT 3: note = Any amino acid
  VARIANT 6: note = Any amino acid
TKXVSXN

SEQ ID NO: 199848 - protein, 7 aa, synthetic construct
  VARIANT 3: note = Any amino acid
  VARIANT 6: note = Any amino acid
QKXPSXA

SEQ ID NO: 199849 - protein, 7 aa, synthetic construct
  VARIANT 4: note = Any amino acid
  VARIANT 6: note = Any amino acid
QKSXSXG

SEQ ID NO: 199850 - protein, 7 aa, synthetic construct
  VARIANT 2: note = Any amino acid
  VARIANT 5: note = Any amino acid
KXTIXKD

SEQ ID NO: 199851 - protein, 7 aa, synthetic construct
  VARIANT 3: note = Any amino acid
  VARIANT 6: note = Any amino acid
GKXPSXA

SEQ ID NO: 199852 - protein, 7 aa, synthetic construct
  VARIANT 3: note = Any amino acid
  VARIANT 5: note = Any amino acid
FKXTXMS

SEQ ID NO: 199853 - protein, 7 aa, synthetic construct
  VARIANT 2: note = Any amino acid
  VARIANT 5: note = Any amino acid
KXMQXQG

SEQ ID NO: 199854 - protein, 7 aa, synthetic construct
  VARIANT 2: note = Any amino acid
  VARIANT 6: note = Any amino acid
QXKPHXN

SEQ ID NO: 199855 - protein, 7 aa, synthetic construct
  VARIANT 5: note = Any amino acid
  VARIANT 6: note = Any amino acid
QPRGXXG

SEQ ID NO: 199856 - protein, 7 aa, synthetic construct
  VARIANT 2: note = Any amino acid
  VARIANT 3: note = Any amino acid
RXXSVAG

SEQ ID NO: 199857 - protein, 7 aa, synthetic construct
  VARIANT 2: note = Any amino acid
  VARIANT 4: note = Any amino acid
RXQXAPF

SEQ ID NO: 199858 - protein, 7 aa, synthetic construct
  VARIANT 5: note = Any amino acid
  VARIANT 6: note = Any amino acid
YMNNXXK

SEQ ID NO: 199859 - protein, 7 aa, synthetic construct
  VARIANT 2: note = Any amino acid
  VARIANT 5: note = Any amino acid
IXRSXTG

SEQ ID NO: 199860 - protein, 7 aa, synthetic construct
  VARIANT 2: note = Any amino acid
  VARIANT 5: note = Any amino acid
KXTSXQA

SEQ ID NO: 199861 - protein, 7 aa, synthetic construct
  VARIANT 2: note = Any amino acid
  VARIANT 5: note = Any amino acid
PXKGXGV

SEQ ID NO: 199862 - protein, 7 aa, synthetic construct
  VARIANT 2: note = Any amino acid
  VARIANT 3: note = Any amino acid
KXXPGMA

SEQ ID NO: 199863 - protein, 7 aa, synthetic construct
  VARIANT 5: note = Any amino acid
  VARIANT 6: note = Any amino acid
RPNNXXP

SEQ ID NO: 199864 - protein, 7 aa, synthetic construct
  VARIANT 2: note = Any amino acid
  VARIANT 4: note = Any amino acid
KXTXQQA

SEQ ID NO: 199865 - protein, 7 aa, synthetic construct
  VARIANT 3: note = Any amino acid
  VARIANT 6: note = Any amino acid
PKXPSXA

SEQ ID NO: 199866 - protein, 7 aa, synthetic construct
  VARIANT 4: note = Any amino acid
  VARIANT 5: note = Any amino acid
KTVXXKD

SEQ ID NO: 199867 - protein, 7 aa, synthetic construct
  VARIANT 3: note = Any amino acid
  VARIANT 6: note = Any amino acid
KAXTNXA

SEQ ID NO: 199868 - protein, 7 aa, synthetic construct
  VARIANT 3: note = Any amino acid
  VARIANT 5: note = Any amino acid
KNXAXQA

SEQ ID NO: 199869 - protein, 7 aa, synthetic construct
  VARIANT 2: note = Any amino acid
  VARIANT 6: note = Any amino acid
KXQTGXA

SEQ ID NO: 199870 - protein, 7 aa, synthetic construct
  VARIANT 5: note = Any amino acid
  VARIANT 6: note = Any amino acid
KTNGXXP

SEQ ID NO: 199871 - protein, 7 aa, synthetic construct
  VARIANT 2: note = Any amino acid
  VARIANT 4: note = Any amino acid
KXTXNTS

SEQ ID NO: 199872 - protein, 7 aa, synthetic construct
  VARIANT 4: note = Any amino acid
  VARIANT 6: note = Any amino acid
KTNXAXP

SEQ ID NO: 199873 - protein, 7 aa, synthetic construct
  VARIANT 4: note = Any amino acid
  VARIANT 5: note = Any amino acid
KSTXXTA

SEQ ID NO: 199874 - protein, 7 aa, synthetic construct
  VARIANT 3: note = Any amino acid
  VARIANT 5: note = Any amino acid
DKXKXGA

SEQ ID NO: 199875 - protein, 7 aa, synthetic construct
  VARIANT 2: note = Any amino acid
  VARIANT 6: note = Any amino acid
NXQKTXG

SEQ ID NO: 199876 - protein, 7 aa, synthetic construct
  VARIANT 2: note = Any amino acid
  VARIANT 3: note = Any amino acid
KXXTGNA

SEQ ID NO: 199877 - protein, 7 aa, synthetic construct
  VARIANT 2: note = Any amino acid
  VARIANT 4: note = Any amino acid
KXNXNVA

SEQ ID NO: 199878 - protein, 7 aa, synthetic construct
  VARIANT 3: note = Any amino acid
  VARIANT 6: note = Any amino acid
KPXTNXS

SEQ ID NO: 199879 - protein, 7 aa, synthetic construct
  VARIANT 4: note = Any amino acid
  VARIANT 5: note = Any amino acid
KPAXXGA

SEQ ID NO: 199880 - protein, 7 aa, synthetic construct
  VARIANT 2: note = Any amino acid
  VARIANT 5: note = Any amino acid
PXKGXSA

SEQ ID NO: 199881 - protein, 7 aa, synthetic construct
  VARIANT 3: note = Any amino acid
  VARIANT 5: note = Any amino acid
SKXSXQP

SEQ ID NO: 199882 - protein, 7 aa, synthetic construct
  VARIANT 2: note = Any amino acid
  VARIANT 3: note = Any amino acid
TXXSSNR

SEQ ID NO: 199883 - protein, 7 aa, synthetic construct
  VARIANT 2: note = Any amino acid
  VARIANT 3: note = Any amino acid
KXXGTNA

SEQ ID NO: 199884 - protein, 7 aa, synthetic construct
  VARIANT 5: note = Any amino acid
  VARIANT 6: note = Any amino acid
RNGSXXG

SEQ ID NO: 199885 - protein, 7 aa, synthetic construct
  VARIANT 2: note = Any amino acid
  VARIANT 6: note = Any amino acid
  VARIANT 7: note = proline or threonine
KXNSSXX

SEQ ID NO: 199886 - protein, 7 aa, synthetic construct
  VARIANT 2: note = Any amino acid
  VARIANT 6: note = Any amino acid
QXGSKXG

SEQ ID NO: 199887 - protein, 7 aa, synthetic construct
  VARIANT 4: note = Any amino acid
  VARIANT 6: note = Any amino acid
KVSXTXA

SEQ ID NO: 199888 - protein, 7 aa, synthetic construct
  VARIANT 4: note = Any amino acid
  VARIANT 6: note = Any amino acid
NSKXTXP

SEQ ID NO: 199889 - protein, 7 aa, synthetic construct
  VARIANT 4: note = Any amino acid
  VARIANT 6: note = Any amino acid
FQKXAXG

SEQ ID NO: 199890 - protein, 7 aa, synthetic construct
  VARIANT 5: note = Any amino acid
  VARIANT 6: note = Any amino acid
KQTQXXA

SEQ ID NO: 199891 - protein, 7 aa, synthetic construct
  VARIANT 3: note = Any amino acid
  VARIANT 4: note = Any amino acid
MNXXGQR

SEQ ID NO: 199892 - protein, 7 aa, synthetic construct
  VARIANT 2: note = Any amino acid
  VARIANT 4: note = Any amino acid
NXKXGQG

SEQ ID NO: 199893 - protein, 7 aa, synthetic construct
  VARIANT 3: note = Any amino acid
  VARIANT 5: note = Any amino acid
TKXVXQG

SEQ ID NO: 199894 - protein, 7 aa, synthetic construct
  VARIANT 3: note = Any amino acid
  VARIANT 6: note = Any amino acid
QKXTSXP

SEQ ID NO: 199895 - protein, 7 aa, synthetic construct
  VARIANT 4: note = Any amino acid
  VARIANT 5: note = Any amino acid
NKVXXSA

SEQ ID NO: 199896 - protein, 7 aa, synthetic construct
  VARIANT 2: note = Any amino acid
  VARIANT 6: note = Any amino acid
KXSGTXA

SEQ ID NO: 199897 - protein, 7 aa, synthetic construct
  VARIANT 3: note = Any amino acid
  VARIANT 5: note = Any amino acid
PKXSXAG

SEQ ID NO: 199898 - protein, 7 aa, synthetic construct
  VARIANT 2: note = Any amino acid
  VARIANT 4: note = Any amino acid
GXQXTQG

SEQ ID NO: 199899 - protein, 7 aa, synthetic construct
  VARIANT 2: note = Any amino acid
  VARIANT 6: note = Any amino acid
KXTSTXA

SEQ ID NO: 199900 - protein, 7 aa, synthetic construct
  VARIANT 5: note = Any amino acid
  VARIANT 6: note = Any amino acid
KNGSXXG

SEQ ID NO: 199901 - protein, 7 aa, synthetic construct
  VARIANT 4: note = Any amino acid
  VARIANT 6: note = Any amino acid
KQGXTXA

SEQ ID NO: 199902 - protein, 7 aa, synthetic construct
  VARIANT 4: note = Any amino acid
  VARIANT 5: note = Any amino acid
NVKXXQG

SEQ ID NO: 199903 - protein, 7 aa, synthetic construct
  VARIANT 3: note = Any amino acid
  VARIANT 6: note = Any amino acid
PRXQQXP

SEQ ID NO: 199904 - protein, 7 aa, synthetic construct
  VARIANT 3: note = Any amino acid
  VARIANT 4: note = Any amino acid
SNXXKSA

SEQ ID NO: 199905 - protein, 7 aa, synthetic construct
  VARIANT 2: note = Any amino acid
  VARIANT 5: note = Any amino acid
TXKSXTP

SEQ ID NO: 199906 - protein, 7 aa, synthetic construct
  VARIANT 3: note = Any amino acid
  VARIANT 4: note = Any amino acid
KTXXPQA

SEQ ID NO: 199907 - protein, 7 aa, synthetic construct
  VARIANT 3: note = Any amino acid
  VARIANT 4: note = Any amino acid
KTXXAKE

SEQ ID NO: 199908 - protein, 7 aa, synthetic construct
  VARIANT 2: note = Any amino acid
  VARIANT 6: note = Any amino acid
KXTTGXG

SEQ ID NO: 199909 - protein, 7 aa, synthetic construct
  VARIANT 3: note = Any amino acid
  VARIANT 4: note = Any amino acid
PKXXNGA

SEQ ID NO: 199910 - protein, 7 aa, synthetic construct
  VARIANT 4: note = Any amino acid
  VARIANT 6: note = Any amino acid
TPRXGXG

SEQ ID NO: 199911 - protein, 7 aa, synthetic construct
  VARIANT 4: note = Any amino acid
  VARIANT 5: note = Any amino acid
KTQXXQA

SEQ ID NO: 199912 - protein, 7 aa, synthetic construct
  VARIANT 4: note = Any amino acid
  VARIANT 6: note = Any amino acid
QPKXGXG

SEQ ID NO: 199913 - protein, 7 aa, synthetic construct
  VARIANT 4: note = Any amino acid
  VARIANT 5: note = Any amino acid
RNSXXNG

SEQ ID NO: 199914 - protein, 7 aa, synthetic construct
  VARIANT 2: note = Any amino acid
  VARIANT 5: note = Any amino acid
  VARIANT 6: note = asparagine or serine
KXSTXXG

SEQ ID NO: 199915 - protein, 7 aa, synthetic construct
  VARIANT 3: note = Any amino acid
  VARIANT 6: note = Any amino acid
KQXSVXA

SEQ ID NO: 199916 - protein, 7 aa, synthetic construct
  VARIANT 2: note = Any amino acid
  VARIANT 5: note = Any amino acid
KXPSXQA

SEQ ID NO: 199917 - protein, 7 aa, synthetic construct
  VARIANT 3: note = Any amino acid
  VARIANT 6: note = Any amino acid
FKXTAXG

SEQ ID NO: 199918 - protein, 7 aa, synthetic construct
  VARIANT 2: note = Any amino acid
  VARIANT 5: note = Any amino acid
KXGSXMS

SEQ ID NO: 199919 - protein, 7 aa, synthetic construct
  VARIANT 2: note = Any amino acid
  VARIANT 5: note = Any amino acid
KXSNXGS

SEQ ID NO: 199920 - protein, 7 aa, synthetic construct
  VARIANT 3: note = Any amino acid
  VARIANT 4: note = Any amino acid
FKXXAQG

SEQ ID NO: 199921 - protein, 7 aa, synthetic construct
  VARIANT 2: note = Any amino acid
  VARIANT 6: note = Any amino acid
KXASGXA

SEQ ID NO: 199922 - protein, 7 aa, synthetic construct
  VARIANT 2: note = Any amino acid
  VARIANT 5: note = Any amino acid
KXSNXAA

SEQ ID NO: 199923 - protein, 7 aa, synthetic construct
  VARIANT 3: note = Any amino acid
  VARIANT 5: note = Any amino acid
KYXTXTG

SEQ ID NO: 199924 - protein, 7 aa, synthetic construct
  VARIANT 2: note = Any amino acid
  VARIANT 4: note = Any amino acid
PXRXNGA

SEQ ID NO: 199925 - protein, 7 aa, synthetic construct
  VARIANT 4: note = Any amino acid
  VARIANT 6: note = Any amino acid
QPRXMXG

SEQ ID NO: 199926 - protein, 7 aa, synthetic construct
  VARIANT 4: note = Any amino acid
  VARIANT 5: note = Any amino acid
RPQXXTG

SEQ ID NO: 199927 - protein, 7 aa, synthetic construct
  VARIANT 2: note = Any amino acid
  VARIANT 3: note = Any amino acid
TXXVNRG

SEQ ID NO: 199928 - protein, 7 aa, synthetic construct
  VARIANT 5: note = Any amino acid
  VARIANT 6: note = Any amino acid
TPRSXXG

SEQ ID NO: 199929 - protein, 7 aa, synthetic construct
  VARIANT 2: note = Any amino acid
  VARIANT 5: note = Any amino acid
  VARIANT 6: note = alanine or glutamine
KXTSXXA

SEQ ID NO: 199930 - protein, 7 aa, synthetic construct
  VARIANT 2: note = Any amino acid
  VARIANT 5: note = Any amino acid
KXNNXNP

SEQ ID NO: 199931 - protein, 7 aa, synthetic construct
  VARIANT 2: note = Any amino acid
  VARIANT 3: note = Any amino acid
TXXGPGR

SEQ ID NO: 199932 - protein, 7 aa, synthetic construct
  VARIANT 2: note = Any amino acid
  VARIANT 5: note = Any amino acid
KXTGXKD

SEQ ID NO: 199933 - protein, 7 aa, synthetic construct
  VARIANT 4: note = Any amino acid
  VARIANT 5: note = Any amino acid
GKNXXSA

SEQ ID NO: 199934 - protein, 7 aa, synthetic construct
  VARIANT 2: note = Any amino acid
  VARIANT 4: note = Any amino acid
SXTXGSP

SEQ ID NO: 199935 - protein, 7 aa, synthetic construct
  VARIANT 5: note = Any amino acid
  VARIANT 6: note = Any amino acid
HQKPXXL

SEQ ID NO: 199936 - protein, 7 aa, synthetic construct
  VARIANT 2: note = Any amino acid
  VARIANT 4: note = Any amino acid
NXNXGTA

SEQ ID NO: 199937 - protein, 7 aa, synthetic construct
  VARIANT 5: note = Any amino acid
  VARIANT 6: note = Any amino acid
SRTPXXA

SEQ ID NO: 199938 - protein, 7 aa, synthetic construct
  VARIANT 3: note = Any amino acid
  VARIANT 6: note = Any amino acid
VKXNNXP

SEQ ID NO: 199939 - protein, 7 aa, synthetic construct
  VARIANT 2: note = Any amino acid
  VARIANT 4: note = Any amino acid
KXNXSIA

SEQ ID NO: 199940 - protein, 7 aa, synthetic construct
  VARIANT 4: note = Any amino acid
  VARIANT 6: note = Any amino acid
KPTXPXS

SEQ ID NO: 199941 - protein, 7 aa, synthetic construct
  VARIANT 2: note = Any amino acid
  VARIANT 6: note = Any amino acid
NXKSTXA

SEQ ID NO: 199942 - protein, 7 aa, synthetic construct
  VARIANT 2: note = Any amino acid
  VARIANT 4: note = Any amino acid
KXNXGNA

SEQ ID NO: 199943 - protein, 7 aa, synthetic construct
  VARIANT 4: note = Any amino acid
  VARIANT 5: note = Any amino acid
KTNXXGS

SEQ ID NO: 199944 - protein, 7 aa, synthetic construct
  VARIANT 2: note = Any amino acid
  VARIANT 3: note = Any amino acid
NXXGRTA

SEQ ID NO: 199945 - protein, 7 aa, synthetic construct
  VARIANT 5: note = Any amino acid
  VARIANT 6: note = Any amino acid
NKPPXXA

SEQ ID NO: 199946 - protein, 7 aa, synthetic construct
  VARIANT 3: note = Any amino acid
  VARIANT 4: note = Any amino acid
SKXXTNS

SEQ ID NO: 199947 - protein, 7 aa, synthetic construct
  VARIANT 3: note = Any amino acid
  VARIANT 5: note = Any amino acid
SKXVXTS

SEQ ID NO: 199948 - protein, 7 aa, synthetic construct
  VARIANT 3: note = Any amino acid
  VARIANT 6: note = Any amino acid
TKXQNXA

SEQ ID NO: 199949 - protein, 7 aa, synthetic construct
  VARIANT 4: note = Any amino acid
  VARIANT 6: note = Any amino acid
TKQXSXS

SEQ ID NO: 199950 - protein, 7 aa, synthetic construct
  VARIANT 4: note = Any amino acid
  VARIANT 5: note = Any amino acid
GAGXXMR

SEQ ID NO: 199951 - protein, 7 aa, synthetic construct
  VARIANT 5: note = Any amino acid
  VARIANT 6: note = Any amino acid
LQSNXXR

SEQ ID NO: 199952 - protein, 7 aa, synthetic construct
  VARIANT 3: note = Any amino acid
  VARIANT 6: note = Any amino acid
NNXTTXR

SEQ ID NO: 199953 - protein, 7 aa, synthetic construct
  VARIANT 3: note = Any amino acid
  VARIANT 5: note = Any amino acid
NQXQXTK

SEQ ID NO: 199954 - protein, 7 aa, synthetic construct
  VARIANT 4: note = Any amino acid
  VARIANT 5: note = Any amino acid
RVGXXDK

SEQ ID NO: 199955 - protein, 7 aa, synthetic construct
  VARIANT 2: note = Any amino acid
  VARIANT 5: note = Any amino acid
YXAGXSR

SEQ ID NO: 199956 - protein, 7 aa, synthetic construct
  VARIANT 4: note = Any amino acid
  VARIANT 5: note = Any amino acid
WNGXXQK

SEQ ID NO: 199957 - protein, 7 aa, synthetic construct
  VARIANT 4: note = Any amino acid
  VARIANT 6: note = Any amino acid
IKHXRXE

SEQ ID NO: 199958 - protein, 7 aa, synthetic construct
  VARIANT 4: note = Any amino acid
  VARIANT 5: note = Any amino acid
YKDXXPR

SEQ ID NO: 199959 - protein, 7 aa, synthetic construct
  VARIANT 3: note = Any amino acid
  VARIANT 5: note = Any amino acid
HNXNXGK

SEQ ID NO: 199960 - protein, 7 aa, synthetic construct
  VARIANT 4: note = Any amino acid
  VARIANT 6: note = Any amino acid
KFKXEXY

SEQ ID NO: 199961 - protein, 7 aa, synthetic construct
  VARIANT 4: note = Any amino acid
  VARIANT 5: note = Any amino acid
NGQXXAR

SEQ ID NO: 199962 - protein, 7 aa, synthetic construct
  VARIANT 3: note = Any amino acid
  VARIANT 5: note = Any amino acid
QIXHXAK

SEQ ID NO: 199963 - protein, 7 aa, synthetic construct
  VARIANT 2: note = Any amino acid
  VARIANT 3: note = Any amino acid
RXXNGIQ

SEQ ID NO: 199964 - protein, 7 aa, synthetic construct
  VARIANT 5: note = Any amino acid
  VARIANT 6: note = Any amino acid
REKPXXM

SEQ ID NO: 199965 - protein, 7 aa, synthetic construct
  VARIANT 2: note = Any amino acid
  VARIANT 4: note = Any amino acid
YXHXMKG

SEQ ID NO: 199966 - protein, 7 aa, synthetic construct
  VARIANT 4: note = Any amino acid
  VARIANT 5: note = Any amino acid
QKNXXSA

SEQ ID NO: 199967 - protein, 7 aa, synthetic construct
  VARIANT 2: note = Any amino acid
  VARIANT 5: note = Any amino acid
FXKTXQA

SEQ ID NO: 199968 - protein, 7 aa, synthetic construct
  VARIANT 4: note = Any amino acid
  VARIANT 5: note = Any amino acid
PTKXXSG

SEQ ID NO: 199969 - protein, 7 aa, synthetic construct
  VARIANT 2: note = Any amino acid
  VARIANT 3: note = Any amino acid
RXXQQNA

SEQ ID NO: 199970 - protein, 7 aa, synthetic construct
  VARIANT 4: note = Any amino acid
  VARIANT 5: note = Any amino acid
QPKXXGG

SEQ ID NO: 199971 - protein, 7 aa, synthetic construct
  VARIANT 3: note = Any amino acid
  VARIANT 6: note = Any amino acid
KNXSTXA

SEQ ID NO: 199972 - protein, 7 aa, synthetic construct
  VARIANT 3: note = glycine or proline
  VARIANT 5: note = Any amino acid
  VARIANT 6: note = Any amino acid
KPXGXXG

SEQ ID NO: 199973 - protein, 7 aa, synthetic construct
  VARIANT 3: note = Any amino acid
  VARIANT 6: note = Any amino acid
RSXPGXA

SEQ ID NO: 199974 - protein, 7 aa, synthetic construct
  VARIANT 2: note = Any amino acid
  VARIANT 3: note = asparagine, glutamine or threonine
  VARIANT 6: note = Any amino acid
KXXSTXA

SEQ ID NO: 199975 - protein, 7 aa, synthetic construct
  VARIANT 5: note = Any amino acid
  VARIANT 6: note = Any amino acid
KPSQXXP

SEQ ID NO: 199976 - protein, 7 aa, synthetic construct
  VARIANT 4: note = Any amino acid
  VARIANT 6: note = Any amino acid
RSSXGXA

SEQ ID NO: 199977 - protein, 7 aa, synthetic construct
  VARIANT 3: note = Any amino acid
  VARIANT 6: note = Any amino acid
RNXPGXG

SEQ ID NO: 199978 - protein, 7 aa, synthetic construct
  VARIANT 2: note = Any amino acid
  VARIANT 6: note = Any amino acid
NXRNTXP

SEQ ID NO: 199979 - protein, 7 aa, synthetic construct
  VARIANT 2: note = Any amino acid
  VARIANT 6: note = Any amino acid
KXGNQXA

SEQ ID NO: 199980 - protein, 7 aa, synthetic construct
  VARIANT 2: note = Any amino acid
  VARIANT 3: note = Any amino acid
SXXSTQS

SEQ ID NO: 199981 - protein, 7 aa, synthetic construct
  VARIANT 3: note = Any amino acid
  VARIANT 4: note = Any amino acid
  VARIANT 5: note = glycine or threonine
NKXXXGG

SEQ ID NO: 199982 - protein, 7 aa, synthetic construct
  VARIANT 3: note = Any amino acid
  VARIANT 4: note = Any amino acid
RNXXNQA

SEQ ID NO: 199983 - protein, 7 aa, synthetic construct
  VARIANT 3: note = Any amino acid
  VARIANT 4: note = Any amino acid
NRXXGQA

SEQ ID NO: 199984 - protein, 7 aa, synthetic construct
  VARIANT 3: note = Any amino acid
  VARIANT 5: note = Any amino acid
NRXNXQG

SEQ ID NO: 199985 - protein, 7 aa, synthetic construct
  VARIANT 2: note = Any amino acid
  VARIANT 5: note = Any amino acid
NXKAXAG

SEQ ID NO: 199986 - protein, 7 aa, synthetic construct
  VARIANT 4: note = Any amino acid
  VARIANT 6: note = Any amino acid
NKQXAXA

SEQ ID NO: 199987 - protein, 7 aa, synthetic construct
  VARIANT 4: note = Any amino acid
  VARIANT 6: note = Any amino acid
MKQXGXG

SEQ ID NO: 199988 - protein, 7 aa, synthetic construct
  VARIANT 4: note = Any amino acid
  VARIANT 6: note = Any amino acid
RGNXTXG

SEQ ID NO: 199989 - protein, 7 aa, synthetic construct
  VARIANT 2: note = Any amino acid
  VARIANT 6: note = Any amino acid
KXNSSXP

SEQ ID NO: 199990 - protein, 7 aa, synthetic construct
  VARIANT 2: note = Any amino acid
  VARIANT 6: note = Any amino acid
KXNNPXA

SEQ ID NO: 199991 - protein, 7 aa, synthetic construct
  VARIANT 4: note = Any amino acid
  VARIANT 6: note = Any amino acid
MKNXGXG

SEQ ID NO: 199992 - protein, 7 aa, synthetic construct
  VARIANT 3: note = Any amino acid
  VARIANT 6: note = Any amino acid
RNXNGXG

SEQ ID NO: 199993 - protein, 7 aa, synthetic construct
  VARIANT 2: note = Any amino acid
  VARIANT 4: note = Any amino acid
GXKXNVA

SEQ ID NO: 199994 - protein, 7 aa, synthetic construct
  VARIANT 2: note = Any amino acid
  VARIANT 3: note = Any amino acid
NXXGTKG

SEQ ID NO: 199995 - protein, 7 aa, synthetic construct
  VARIANT 3: note = Any amino acid
  VARIANT 4: note = Any amino acid
NNXXNKG

SEQ ID NO: 199996 - protein, 7 aa, synthetic construct
  VARIANT 4: note = Any amino acid
  VARIANT 5: note = Any amino acid
RDKXXGG

SEQ ID NO: 199997 - protein, 7 aa, synthetic construct
  VARIANT 3: note = Any amino acid
  VARIANT 5: note = Any amino acid
RQXNXQG

SEQ ID NO: 199998 - protein, 7 aa, synthetic construct
  VARIANT 5: note = Any amino acid
  VARIANT 6: note = Any amino acid
TSKGXXG

SEQ ID NO: 199999 - protein, 7 aa, synthetic construct
  VARIANT 4: note = Any amino acid
  VARIANT 5: note = Any amino acid
IRAXXEK

SEQ ID NO: 200000 - protein, 7 aa, synthetic construct
  VARIANT 2: note = Any amino acid
  VARIANT 6: note = Any amino acid
DXKPRXQ

SEQ ID NO: 200001 - protein, 7 aa, synthetic construct
  VARIANT 4: note = Any amino acid
  VARIANT 5: note = Any amino acid
ILHXXKN

SEQ ID NO: 200002 - protein, 7 aa, synthetic construct
  VARIANT 2: note = Any amino acid
  VARIANT 6: note = Any amino acid
VXRSDXK

SEQ ID NO: 200003 - protein, 7 aa, synthetic construct
  VARIANT 3: note = Any amino acid
  VARIANT 6: note = Any amino acid
TDXKRXL

SEQ ID NO: 200004 - protein, 7 aa, synthetic construct
  VARIANT 3: note = Any amino acid
  VARIANT 4: note = Any amino acid
EKXXTRQ

SEQ ID NO: 200005 - protein, 7 aa, synthetic construct
  VARIANT 3: note = Any amino acid
  VARIANT 5: note = Any amino acid
ILXHXKN

SEQ ID NO: 200006 - protein, 7 aa, synthetic construct
  VARIANT 2: note = Any amino acid
  VARIANT 5: note = Any amino acid
VXKGXYN

SEQ ID NO: 200007 - protein, 7 aa, synthetic construct
  VARIANT 2: note = Any amino acid
  VARIANT 3: note = Any amino acid
GXXHKQL

SEQ ID NO: 200008 - protein, 7 aa, synthetic construct
  VARIANT 2: note = Any amino acid
  VARIANT 5: note = Any amino acid
YXSHXKG

SEQ ID NO: 200009 - protein, 7 aa, synthetic construct
  VARIANT 4: note = Any amino acid
  VARIANT 6: note = Any amino acid
QGRXLXA

SEQ ID NO: 200010 - protein, 7 aa, synthetic construct
  VARIANT 4: note = Any amino acid
  VARIANT 5: note = Any amino acid
YTSXXKG

SEQ ID NO: 200011 - protein, 7 aa, synthetic construct
  VARIANT 2: note = Any amino acid
  VARIANT 3: note = Any amino acid
GXXETRK

SEQ ID NO: 200012 - protein, 7 aa, synthetic construct
  VARIANT 3: note = Any amino acid
  VARIANT 5: note = Any amino acid
DLXKXRA

SEQ ID NO: 200013 - protein, 7 aa, synthetic construct
  VARIANT 2: note = Any amino acid
  VARIANT 6: note = Any amino acid
DXRPKXV

SEQ ID NO: 200014 - protein, 7 aa, synthetic construct
  VARIANT 3: note = Any amino acid
  VARIANT 4: note = Any amino acid
DRXXVKQ

SEQ ID NO: 200015 - protein, 7 aa, synthetic construct
  VARIANT 2: note = Any amino acid
  VARIANT 3: note = Any amino acid
GXXTEKK

SEQ ID NO: 200016 - protein, 7 aa, synthetic construct
  VARIANT 2: note = Any amino acid
  VARIANT 4: note = Any amino acid
IXRXMRE

SEQ ID NO: 200017 - protein, 7 aa, synthetic construct
  VARIANT 5: note = Any amino acid
  VARIANT 6: note = Any amino acid
NDMRXXK

SEQ ID NO: 200018 - protein, 7 aa, synthetic construct
  VARIANT 3: note = Any amino acid
  VARIANT 6: note = Any amino acid
NEXKRXV

SEQ ID NO: 200019 - protein, 7 aa, synthetic construct
  VARIANT 4: note = Any amino acid
  VARIANT 6: note = Any amino acid
QARXEXR

SEQ ID NO: 200020 - protein, 7 aa, synthetic construct
  VARIANT 4: note = Any amino acid
  VARIANT 5: note = Any amino acid
YTEXXKK

SEQ ID NO: 200021 - protein, 7 aa, synthetic construct
  VARIANT 3: note = asparagine or serine
  VARIANT 4: note = Any amino acid
  VARIANT 6: note = Any amino acid
NKXXGXA

SEQ ID NO: 200022 - protein, 7 aa, synthetic construct
  VARIANT 2: note = Any amino acid
  VARIANT 3: note = Any amino acid
  VARIANT 6: note = glycine or serine
TXXKSXG

SEQ ID NO: 200023 - protein, 7 aa, synthetic construct
  VARIANT 1: note = methionine or threonine
  VARIANT 2: note = Any amino acid
  VARIANT 6: note = Any amino acid
XXSTKXG

SEQ ID NO: 200024 - protein, 7 aa, synthetic construct
  VARIANT 3: note = Any amino acid
  VARIANT 4: note = serine or threonine
  VARIANT 6: note = Any amino acid
RPXXGXA

SEQ ID NO: 200025 - protein, 7 aa, synthetic construct
ALRQSWG

SEQ ID NO: 200026 - protein, 7 aa, synthetic construct
YTRPQIM

SEQ ID NO: 200027 - protein, 7 aa, synthetic construct
SFGLHSV
